United States Patent Application Publication US 2026/0109980 A1 - sequence listing, part 2

SEQ ID NO: 1756 - DNA, 12612 bp, Synthetic construct
  source 1..12612: mol_type = other DNA
gacgaaagggcctcgtgatacgcctatttttataggttaatgtcatgataataatggtttcttagacgtcaggtggcacttttcggggaaatgtgcgcggaacccctatttgtttatttttctaaatacattcaaatatgtatccgctcatgagacaataaccctgataaatgcttcaataatattgaaaaaggaagagtatgagtattcaacatttccgtgtcgcccttattcccttttttgcggcattttgccttcctgtttttgctcacccagaaacgctggtgaaagtaaaagatgctgaagatcagttgggtgcacgagtgggttacatcgaactggatctcaacagcggtaagatccttgagagttttcgccccgaagaacgttttccaatgatgagcacttttaaagttctgctatgtggcgcggtattatcccgtattgacgccgggcaagagcaactcggtcgccgcatacactattctcagaatgacttggttgagtactcaccagtcacagaaaagcatcttacggatggcatgacagtaagagaattatgcagtgctgccataaccatgagtgataacactgcggccaacttacttctgacaacgatcggaggaccgaaggagctaaccgcttttttgcacaacatgggggatcatgtaactcgccttgatcgttgggaaccggagctgaatgaagccataccaaacgacgagcgtgacaccacgatgcctgtagcaatggcaacaacgttgcgcaaactattaactggcgaactacttactctagcttcccggcaacaattaatagactggatggaggcggataaagttgcaggaccacttctgcgctcggcccttccggctggctggtttattgctgataaatctggagccggtgagcgtggctctcgcggtatcattgcagcactggggccagatggtaagccctcccgtatcgtagttatctacacgacggggagtcaggcaactatggatgaacgaaatagacagatcgctgagataggtgcctcactgattaagcattggtaactgtcagaccaagtttactcatatatactttagattgatttaaaacttcatttttaatttaaaaggatctaggtgaagatcctttttgataatctcatgaccaaaatcccttaacgtgagttttcgttccactgagcgtcagaccccgtagaaaagatcaaaggatcttcttgagatcctttttttctgcgcgtaatctgctgcttgcaaacaaaaaaaccaccgctaccagcggtggtttgtttgccggatcaagagctaccaactctttttccgaaggtaactggcttcagcagagcgcagataccaaatactgttcttctagtgtagccgtagttaggccaccacttcaagaactctgtagcaccgcctacatacctcgctctgctaatcctgttaccagtggctgctgccagtggcgataagtcgtgtcttaccgggttggactcaagacgatagttaccggataaggcgcagcggtcgggctgaacggggggttcgtgcacacagcccagcttggagcgaacgacctacaccgaactgagatacctacagcgtgagctatgagaaagcgccacgcttcccgaagggagaaaggcggacaggtatccggtaagcggcagggtcggaacaggagagcgcacgagggagcttccagggggaaacgcctggtatctttatagtcctgtcgggtttcgccacctctgacttgagcgtcgatttttgtgatgctcgtcaggggggcggagcctatggaaaaacgccagcaacgcggcctttttacggttcctggccttttgctggccttttgctcacatgttctttcctgcgttatcccctgattctgtggataaccgtattaccgcctttgagtgagctgataccgctcgccgcagccgaactaccgagcgcagcgagtcagtgagcgaggaagcggaagagcgcccaatacgcaaaccgcctctccccgcgcgttggccgattcattaatgcagcccaagctttgttgatacaaccataaaatgataattacacccataaattgataattatcacacccataaattgatattgcctcttcatggtctaaacttcagtaagtttacgacattttcctcgaggtcatttccggggtacagctcgtccatgccgagagtgatcccggcggcggtcacgaactccagcaggaccatgtgatcgcgcttctcgttggggtctttgctcagggcggactgggtgctcaggtagtggttgtcgggcagcagcacggggccgtcgccgatgggggtgttctgctggtagtggtcggcgagctgcacgctgccgtcctcgatgttgtggcggatcttgaagttcaccttgatgccgttcttctgcttgtcggccatgatatagacgttgtggctgttgtagttgtactccagcttgtgccccaggatgttgccgtcctccttgaagtcgatgcccttcagctcgatgcggttcaccagggtgtcgccctcgaacttcacctcggcgcgggtcttgtagttgccgtcgtccttgaagaagatggtgcgctcctggacgtagccttcgggcatggcggacttgaagaagtcgtgctgcttcatgtggtcggggtagcggctgaagcactgcacgccgtaggtcagggtggtcacgagggtgggccagggcacgggcagcttgccggtggtgcagatgaacttcagggtcagcttgccgtaggtggcatcgccctcgccctcgccggacacgctgaacttgtggccgtttacgtcgccgtccagctcgaccaggatgggcaccaccccggtgaacagctcctcgcccttgctcactgggccaggattctcctcgacgtcaccgcatgttagcagacttcctctgccctctccactgccgaattcctttttcttttttgcctggccggcctttttcgtggccgccggccttttgtcgcctcccagctgagacaggtcgatccgtgtctcgtacaggccggtgatgctctggtggatcagggtggcgtccagcacctctttggtgctggtgtacctcttccggtcgatggtggtgtcaaagtacttgaaggcggcaggggctcccagattggtcagggtaaacaggtggatgatattctcggcctgctctctgatgggcttatcccggtgcttgttgtaggcggacagcactttgtccagattagcgtcggccaggatcactctcttggagaactcgctgatctgctcgatgatctcgtccaggtagtgcttgtgctgttccacaaacagctgtttctgctcattatcctcgggggagcccttcagcttctcatagtggctggccaggtacaggaagttcacatatttggagggcagggccagttcgtttcccttctgcagttcgccggcagaggccagcattctcttccggccgttttccagctcgaacagggagtacttaggcagcttgatgatcaggtcctttttcacttctttgtagcccttggcttccagaaagtcgatgggattcttctcgaagctgcttctttccatgatggtgatccccagcagctctttcacactcttcagtttcttggacttgcccttttccactttggccaccaccagcacagaataggccacggtggggctgtcgaagccgccgtacttcttagggtcccagtccttctttctggcgatcagcttatcgctgttcctcttgggcaggatagactctttgctgaagccgcctgtctgcacctcggtctttttcacgatattcacttggggcatgctcagcactttccgcacggtggcaaaatcccggcccttatcccacacgatctccccggtttcgccgtttgtctcgatcagaggccgcttccggatctcgccgttggccagggtaatctcggtcttgaaaaagttcatgatgttgctgtagaagaagtacttggcggtagccttgccgatttcctgctcgctcttggcgatcatcttccgcacgtcgtacaccttgtagtcgccgtacacgaactcgctttccagcttagggtactttttgatcagggcggttcccacgacggcgttcaggtaggcgtcgtgggcgtggtggtagttgttgatctcgcgcactttgtaaaactggaaatccttccggaaatcggacaccagcttggacttcagggtgatcactttcacttcccggatcagcttgtcattctcgtcgtacttagtgttcatccgggagtccaggatctgtgccacagccctcccacacataaccagagggcagcaattcacgaatcccaactgccgtcggctgtccatcactgtccttcactatggctttgatcccaggatgcagatcgagaagcacctgtcggcaccgtccgcaggggctcaagatgcccctgttctcatttccgatcgcgacgatacaagtcaggttgccagctgccgcagcagcagcagtgcccagcaccacgagttctgcacaaggtcccccagtaaaatgatatacattgacaccagtgaagatgcggccgtcgctagagagagctgcgctggcgacgctgtagtcttcagagatggggatgctgttgattgtagccgttgctctttcaatgagggtggattcttcttgagacaaaggcttggccatcggtccaggattctcttcgacatctccggcttgtttcagcagagagaagtttgttgcgccggatccggcatagtcggggacatcatatgggtatgcataatcaggcacgtcgtagggataagcgtaatctggaacatcgtatgggtatttcttcttcttagcctgtccagccttctttgtggcggcaggtcgcttggatcccttgtacagctcatccataccgagagtgatgcctgcggcagtcacaaattccagaaggaccatgtgatctctcttttcgtttgggtccttggaaagctttgattgcgtggagagataatgattgtcaggcaagagtacaggtccatctccgatgggcgtattttgttggtaatgatcagccagttgaacactaccatcttcgacattatgtcggatcttaaagttggcctttatcccatttttctgcttatcagcggtaatatacacattatggctgttaaagttgtactccaacttgtgccccagtatgttaccgtcctccttaaaatcaatacctttcagttcaattcgattaaccagagtgtccccttcaaatttaacctcggctcgggttttatatgtaccatcatccttaaagctgatggtcctttcttgaacataaccttcaggcattgcagacttgaaaaagtcatgctgtttcatgtggtcgggatatcgagaaaagcattgcacgccgtaggtgagggtcgttacgagtgtaggccatgggacgggcagtttgcccgtcgtacagatgaatttcagagtcagcttaccattcgtggcgtccccttcgccttcgcccctgacggagaatttatgtccatttacatctccatcaagctctaccagaatgggcactactccagtgaagagttcttcacctttactcacgctacctcctcctccgcttcctcctcctccgcttccacctcctccttccagggccttgtactcgaacatgactttcacgagttcgcacagttcctcgctgttccggtcggtcatcagtttctttttcttcagattcttcaggtgcacgatcttctctgattccagggtctggatttcgatcttcttgtcagcgccgatcttgaaggtggccacgaagccgtattctttcagaatgtccacgatggacttcatgatggcgttcttcagcttccggtcgtaggacagcagcttccgcaggttttccagcacttccagcaggctaatctcggcgtgggggatgtagttgaagtgggcaatgtagttccggatgtacaggtcctttttttcctgcttcagtttcttcactttcttgtcggagtagatgctccgcttttccacattgtccttgtacagttctttgtagaagttgatatacttttccacgatctggccgcttttgtacttcacattcttggagttgtcgaaattgaaaatttcctcgatgtagtggttctcgggaaactcgcccttcagccggaatctcaggtcccgctcccagatgctggtgtagcccacgagccggtgcaggatcttcagcagcaggccctgcagcaggttcagctcattgaattccaccttgttcttcaggtgggtgtacttctggatgttgccgatggccttctcatactctttgtagtcctcgtcgttgaacttttcgtccttcttgggtctggcgtacttccggtgcaggttctgctgcatggtgtagttcttttcaatctcattcttcttgttgctgtactctttcagttctttcaggctgatcttatacttggccttatcggcgatcttttccagcagattcagcatgccgtatttcttgatattgtagaaggcccggtgcttgatgatgttctcgccgtcgaaatagatcttgttggtgtcgaactttttcagctctttccggtccttgattttgttttcgttgaagtccaggaacttgccgatctcgttggcttccagctcgaagtcctcggtcactctgttgttgtccaggttcagcaggttgatcagttccaactcgtcgctgaaggtttcttctttgttggcggactggtacttttccaggctgcccttcaggttggtcagctctttgtggttcagcagcttcaggatcaggtaaaacatgttcagattctcggtgtacttcagaatcttccccagcttgatctcgcgcacgaactcattgatctcgtgagggatttctttgttccgattgtgcttctcatagttcttcaggatcttgtcgtacttctctttgttatcctttttgatcttgatcttggagaagatgtcgttgttgtcattgttgttgttgctctcgatatacttcagattgttcttgttcaggtagtcgatgaagcccttcaggaaaatctgctgaataaagtcgatgtaggtattcttttcctctttgtcctggttgttgatcatctctctgctctggatgatggccaggtattccacgggcacggttttctcgatgttctcgaacttctgatacttgtagtggccggttttctggttccgctgcttgttaatcttgatcacttcattggtgatcttaaagaacaccttggagtttttcacgaacttgttcaggaactcgccgtagtagatattcttcagcaggtagatctgggcgtccttctcttctttgtccttgggcacgctccaaaaaaacttcagggtattccgcaggtcctcaatcttgttgtacagcttggtgaagctgggcacgaaggggatgtttttgttcacgaagttgaacttggtattcttcaggtacttgatgatcacatccttctcgtagtagttgaacacgttggcgctgttcagctgcttgaagattttcagcttcagcttcttttcgttgatttcgttctgaaacatcttcttggagatctcgctgggggcgatattcttgaaggcgaagatgtccttgccttccagttccaggttgaagtgcacgatgccgtgtctgatgctgctgatggcctcgtcgatgttggcgaagaagtcctcgatctcgttcttgttgtccatgttgaagtcgtagctgtagaacatcttcagattttctttcacttcgttctgcttgttctcattgtagatcttgtccacctcgccggacacgtatttctcttcgcccttgttgttcttcacggtcttgccccgcatccggccggtgataccgttctcgttctcggtttccaggatgttcctcaggctgaagtaggccacgctggacacgccgatgatgtttctcaggaaggcctcgttctgccggttccgggcgataaagtcggaggtggcgatctcgcccacttgcagatagtagttgtacttgccgcagttccgcacgtaggtgtccagcttgttcagcagtttgttttcgatcagctttttcagattctggtactcgaagatccgcttgatcttatcgttgctgatgttgctcagccgcttgtacacgtagtttttcagcagctgggacatctcgatttccacgaagtggcagaaggcgtacttaatattcttgtcgttcagttcctctttgtccaggtagtacttgtagaacacctggcttttcttcagctcagacatgtcggggatcttctcaatcagctctttgatgttgttcacgttctggatctcttcgtagataatcttggcgaagttctctttgtcgttcttccggccgatgatcttgtgatagtactcgcggatcttgtacttctcgtgcttcttgctgttctcgatcaggaaaaacagtttctcgatatcctctttcttatacagcttgtcgaaggcttcctgcacgttgttgatgtagtcgttgcgcttggcgctctctctgtagtagtcgtagatgatgttccgcttgctcttgccgcccactttttccacgttgttctcgttgatcttctggtagttggccttgttctcttcgaagctgtacttcaggctgttgatcttgttcagcttggcttccacgtccttccgaaagatttccagttcctcagagttcacgtcctcgttcagcaggatcttcttcagcacggagaagctgttcttgtttttcaggtcgtactcgctgatgtcctcttcgctatagttcttgtcctgcacggcgttcttttctttccggttcttcagatacagcacgctgtccttcaggtgcagcaccttgttgctaaagaacttcttcaggttctctcttctgatccggttctcttcctcggaggcgttgtcggggttcttgatgtagatgtccagccggatgctcagcagctcgctcagtctctcgctggtccggttttcctcgctggtggacttcacgagcttgccctcttcgatgtacttcttgtggctgatgccgtcgaccttggtcactttcatggatcgtgctttgtgatctgccgggtttccaccagctgtctcttgatgaagccggccttatccagttcgctcaggccgcctctctcggccttggtcagattgtcgaactttctctgggtaatcagcttggcgttcagcagctgccgccagtagttcttcatcttcttcacgacctcttcggagggcacgttgtcgctcttgccccggttcttgtcgcttctggtcagcaccttgttgtcgatggagtcgtccttcagaaagctctgaggcacgatatggtccacatcgtagtcggacagccggttgatgtccagttcctggtccacgtacatatcccgcccattctgcaggtagtacaggtacagcttctcgttctgcagctgggtgttttccacggggtgttctttcaggatctggctgcccagctctttgatgccctcttcgatccgcttcattctctcgcggctgttcttctgtcccttctgggtggtctggttctctctggccatttcgatcacgatgttctcgggcttgtgccggcccatcactttcacgagctcgtccaccaccttcactgtctgcaggatgcccttcttaatggcggggctgccggccagattggcaatgtgctcgtgcaggctatcgccctggccggacacctgggctttctggatgtcctctttaaaggtcaggctgtcgtcgtggatcagctgcatgaagtttctgttggcgaagccgtcggacttcaggaaatccaggattgtcttgccggactgcttgtcccggatgccgttgatcagcttccggctcagcctgccccagccggtgtatctccgccgcttcagctgcttcatcactttgtcgtcgaacaggtgggcataggttttcagccgttcctcgatcatctctctgtcctcaaacagtgtcagggtcagcacgatatcttccagaatgtcctcgttttcctcattgtccaggaagtccttgtccttgataattttcagcagatcgtggtatgtgcccagggaggcgttgaaccgatcttccacgccggagatttccacggagtcgaagcactcgattttcttgaagtagtcctctttcagctgcttcacggtcactttccggttggtcttgaacagcaggtccacgatggcctttttctgctcgccgctcaggaaggcgggctttctcattccctcggtcacgtatttcactttggtcagctcgttatacacggtgaagtactcgtacagcaggctgtgcttgggcagcaccttctcgttgggcaggttcttatcgaagttggtcatccgctcgatgaagctctgggcggaagcgcccttgtccaccacttcctcgaagttccagggggtgatggtttcctcgctctttctggtcatccaggcgaatctgctgtttcccctggccagagggcccacgtagtaggggatgcggaaggtcaggatcttctcgatcttttcccggttgtccttcaggaatgggtaaaaatcttcctgccgccgcagaatggcgtgcagctctcccaggtggatctggtgggggatgctgccgttgtcgaaggtccgctgcttccgcagcaggtcctctctgttcagcttcacgagcagttcctcggtgccgtccatcttttccaggatgggcttgatgaacttgtagaactcttcctggctggctccgccgtcaatgtagccggcgtagccgttcttgctctggtcgaagaaaatctctttgtacttctcaggcagctgctgccgcacgagagctttcagcagggtcaggtcctggtggtgctcgtcgtatctcttgatcatagaggcgctcaggggggccttggtgatctcggtgttcactctcaggatgtcgctcagcaggatggcgtcggacaggttcttggcggccagaaacaggtcggcgtactggtcgccgatctgggccagcaggttgtccaggtcgtcgtcgtaggtgtccttgctcagctgcagtttggcatcctcggccaggtcgaagttgctcttgaagttgggggtcaggcccaggctcagggcaatcaggtttccgaacaggccattcttcttctcgccgggcagctgggcgatcagattttccagccgtctgctcttgctcagtctggcagacaggatggccttggcgtccacgccgctggcgttgatggggttttcctcgaacagctggttgtaggtctgcaccagctggatgaacagcttgtccacgtcgctgttgtcggggttcaggtcgccctcgatcaggaagtggccccggaacttgatcatgtgggccagggccagatagatcagccgcaggtcggccttgtcggtgctgtccaccagtttctttctcaggtggtagatggtggggtacttctcgtggtaggccacctcgtccacgatgttgccgaagatggggtgccgctcgtgcttcttatcctcttccaccaggaaggactcttccagtctgtggaagaagctgtcgtccaccttggccatctcgttgctgaagatctcttgcagatagcagatccggttcttccgtctggtgtatcttcttctggcggttctcttcagccgggtggcctcggctgtttcgccgctgtcgaacagcagggctccgatcaggttcttcttgatgctgtgccggtcggtgttgcccagcaccttgaatttcttgctgggcaccttgtactcgtcggtgatcacggcccagcccacagagttggtgccgatgtccaggccgatgctgtacttcttgtcggctgctgggactccgtggataccgaccttccgcttcttctttggggccatcttatcgtcatcgtctttgtaatcaatatcatgatccttgtagtctccgtcgtggtccagtccttactgcagtagttttgctgaaatactcgattcacaaaaatatcaacttatggttgttttgtgagatatcaatatatggttgttttgtggttaagttgctgattataaataattattaaatatcactttatggttgcatcaacaggtaccgagctcgaattcactggccgtcgttttacaacgtcgtgactgggaaaaccctggcgttacccaacttaatcgccttgcagcacatccccctttcgccagctggcgtaatagcgaagaggcccgcaccgatcgcccttcccaacagttgcgcagcctgaatggcgaatggcgcctgatgcggtattttctccttacgcatctgtgcggtatttcacaccgcatatggtgcactctcagtacaatctgctctgatgccgcatagttaagccagccccgacacccgccaacacccgctgacgcgccctgacgggcttgtctgctcccggcatccgcttacagacaagctgtgaccgtctccgggagctgcatgtgtcagaggttttcaccgtcatcaccgaaacgcgcga

SEQ ID NO: 1757 - DNA, 12934 bp, Synthetic construct
  source 1..12934: mol_type = other DNA
aacgtggctggcctggttcaccacgcgggaaacggtctgataagagacaccggcatactctgcgacatcgtataacgttactggtttcacattcaccaccctgaattgactctcttccgggcgctatcatgccataccgcgaaaggttttgcgccattcgatggtgtccgggatctcgacgctctcccttatgcgactcctgcattaggaatggataaccgtattaccgcctttgagtgagctgataccgctcgccgcagccgaactaccgagcgcagcgagtcagtgagcgaggagcgactcctgcattaggaaattaatacgactcactataggggaattgtgagcggataacaattcccctgtagaaataattttgtttaactttaataaggagatataccatgggtgaactgccgagtaggtagctgataacagtacagcgcggctgaaatcatcattaaagcggtgaactgccgagtaggtagctgataacgcattactaagctggcgcgtgaagctgtagaagtgaactgccgagtaggtagctgataacggatccgaattcgagcgaaggagatatacatatgtttttgcaaagacctaaaccttacagcgatgaaagtttagaaagtttctttatccgagtggctaacaaaaatggctacggtgatgtccatcgcttcctagaagccactaaacgattccttcaagacattgaccataatggctatcaaacctttccgactgatataactcggataaacccatactcagctaaaaacagttccagcgcacgaactgcgtcattcctgaaacttgcacaattgacatttaatgaaccgccagagctacttgggttggcaattaacagaacaaacatgaaatactcgccgtcaactagcgcggttgttagaggtgcagaagtctttcctcgcagtttactacggacgcactccatcccctgctgtcctttgtgtctgcgagaaaatggctacgcctcctacctttggcactttcaggggtacgaatactgccacagccataacgtacctttaattaccacttgtagctgtggtaaggagtttgactaccgagtatctgggttaaagggcatttgctgcaaatgcaaggagcctatcaccttaaccagcagggagaacggtcatgaggcagcgtgtactgtttcaaactggcttgctggccatgaatctaaacctctgccaaatcttcctaaaagctaccgatggggtttagttcattggtggatgggtattaaagatagcgagttcgatcacttttcgttcgttcaatttttctcaaactggccaaggtcattccactcgataatcgaagatgaagtagagttcaaccttgagcatgctgttgtcagcacgtctgaattacgactaaaagatcttcttggtcgattgtttttcggttcaattcggttacctgagcggaatcttcaacacaatatcatccttggtgagcttctctgctatttagaaaatcgtttatggcaagacaagggattaatcgccaacctcaaaatgaacgcgttagaggcgactgtaatgttaaattgtagcctcgatcagattgcatcaatggttgaacaacgcatcttgaagccaaatcgaaaaagcaagcccaacagccctcttgatgttaccgattatctatttcatttcggcgatattttctgtctttggttagctgagttccaaagcgatgagtttaaccgttcgttttatgtgtcgaggtggtaaatgcaaactctgaaagaactaatcgcatccaatcctgacgacttaacaactgaacttaagagagcatttcgtccactcacaccgcatattgcaattgatggtaatgaacttgacgcactgacgatattagtcaatttaaccgataagactgatgatcagaaagacctgctcgatcgagccaaatgcaagcaaaaacttcgagatgaaaaatggtgggctagctgcataaattgcgttaattacagacaaagccataacccaaaattcccggatatacgttctgaaggcgtgattcgaacccaagccctgggtgaattaccgagtttcctactctcgtcctcaaaaatcccaccataccattggtcatatagccatgattcaaaatacgtcaacaaaagcgcattcctcaccaatgagttttgttgggatggtgagatctcatgtttgggtgagcttcttaaagatgcagatcacccactttggaatactttgaaaaagttaggttgttctcaaaaaacttgcaaagcaatggcaaaacaactagctgatattactctcacgactatcaatgtcacactcgcaccaaattacctgactcaaatatctctccccgatagtgatacatcctacatttcactctctcctgttgcatcgctatcgatgcaaagccactttcatcagaggctccaagatgaaaatcggcatagcgcgataacgcggtttagccgaactaccaacatgggggtcactgcgatgacatgtggcggcgcatttagaatgttaaagtctggcgctaagttttccagcccccctcatcaccgattaaacagtaaacgaagttggttgacgtcagagcatgttcagtcattaaaacagtaccagcgcctcaacaaaagcctcatacctgaaaactctcggattgcactccgtagaaaatacaaaatcgagcttcaaaatatggtcagatcttggtttgcaatgcaagaccatacccttgattcgaacatacttatccaacatttgaatcatgacctatcttacttaggagccacaaaacgttttgcatacgatccagcgatgaccaagctctttactgagcttttgaaacgagagttatcaaattcaatcaataatggtgagcaacacactaatggatcgtttttagtcctaccgaatatcagggtttgtggcgcaacagctttaagctccccggtaacggtggggattccatcacttacagctttctttggcttcgttcacgcatttgaacggaatataaatcgcaccacctcatcgtttcgtgttgaatcctttgcgatatgcgtccatcaactacatgtcgagaagcgaggtttgacagcagagtttgtggaaaaaggcgacgggactatatccgctcccgcgacccgggatgactggcagtgtgatgtcgtatttagccttattttgaacaccaactttgctcaacatattgaccaagatacgttagttacatcactaccaaagcgattggctcggggttcagcaaaaattgcgattgatgactttaaacatatcaactcattctcgacattagaaacagcgatcgaatctctgccaatagaagctggtaggtggttatcactttacgcacagtcaaacaataatctaagtgatctattagcagccatgacagaggaccatcagctcatggcaagctgcgtcggttaccacttgttagaagagcccaaagataaaccaaactccctcagaggttacaaacacgctatcgccgagtgcatcattggactcattaactcaatcacctttagctcagagactgatcccaacacaatcttttggtcgctaaagaactatcaaaactacctagtggtacagccaaggagtatcaacgatgaaactaccgacaaatctagcctatgagcgctctatcgacccatcagatgtctgtttttttgtcgtctggcccgatgatagaaaaacacctttaacctacaattctcgtactctgctcgggcaaatggaagcggcatcattagcctatgatgtctcaggtcaaccaataaaaagtgccaccgctgaggcgttagctcaagggaaccctcatcaagttgatttctgccacgttccatacggtgcgagtcatattgaatgcagtttctccgtctcgttttcttctgaactacgtcaaccatataagtgtaactcaagcaaagttaaacaaacgctagtgcaattagtcgagctctacgaaacgaaaatcggctggactgagctagcaacccgatatttgatgaacatttgcaacggtaaatggctgtggaaaaatacccgtaaagcctattgctggaacattgtacttacaccttggccttggaacggggaaaaggttggatttgaagatattcgtactaactacacctcacggcaagactttaaaaataataaaaattggtctgctatagttgaaatgatcaaaaccgcattttctagtactgatgggctggcgatatttgaagtcagggccaccttgcacttgccaacgaatgctatggtgcggccaagccaagttttcacagaaaaagaaagtggcagtaaaagtaaatctaaaactcaaaacagtcgagtttttcagagtacaactattgatggtgaacgatcgccaatactaggggcctttaaaacgggagcagctattgcaaccattgacgactggtatcctgaagccactgagccactaagggtcggacggtttggggttcatcgcgaagatgtcacttgctaccgtcatccgtctaccggaaaagattttttctcgatattacaacaagcagagcactatattgaagtgttgagcgccaacaaaactcccgctcaagaaactatcaacgacatgcactttttaatggctaacctgattaagggtgggatgttccagcataaaggagactgactgtgaaatggtattataagacaatcacctttctgccagagttgtgcaacaacgagtcactggctgcaaagtgtctccgcgttctgcatggatttaactatcagtatgagacacgaaatatcggcgtttcatttccgctttggtgtgatgcaacggttggaaaaaagatttcatttgtcagcaagaacaagatagaactcgacttactacttaaacaacactatttcgtccaaatggaacaacttcaatactttcatatatccaacactgttctcgtcccagaagattgtacatacgtttcctttagacgctgtcaatctatagataagctcacagcagcagggctggcaaggaaaatcagacgcctggagaaacgtgctctatctagaggcgagcaatttgacccatcatcttttgctcaaaaagagcatactgcaatagcgcactaccactcacttggggagtccagcaaacagacgaaccgcaactttcgactcaatatcaggatgctctcggagcaaccccgtgaggggaactcgatttttagtagctatggcttatcaaattcagaaaactcgtttcagcctgtacccttaatctgacctttaataaggagatataccatggcgacaagtttacctacgccctcagcaattacgacttcggcgttagagtatgcattccatactcccgctcgcaatctaacgaaatctcgcggaaaaaacattcatcgttatgtcagtgtaaagatgagtaagaggattacggtagaatctactctagagtgtgatgcctgctatcactttgattttgagccaagtattgttcgcttttgcgctcaaccgattcgatttttatattatctcaatggtcagtctcactcctatgttcctgactttctagttcaatttgataccaacgagtttgttctatatgaagtaaagtcagcttatgctaagaacaaacctgattttgatgttgaatgggaggcgaaagtaaaagcagcaactgaactagggctagaattggagcttgttgaagagagtgatattagggatacggttgtattaaataatcttaagcgcatgcatcgttatgcttcgaaagatgagctgaataacgtacataactctctcttaaaaataataaagtacaatggcgcccaatctgcaagatgcttgggagaacagttgggtttaaaaggccgaactgttttaccaattttgtgcgatttgctgtcaaggtgtttactcgatacacgtttggataagcctctatctcttgaatctcgatttgagttggccagttatggctaagaaagggttctcaagtttccatagaaaagcagtctcttcccaagatacgcttgaatcgatagagcttgtctctagcgctaattgtctagaaagtgttacgtatcaagatatatcagcatttcccgaaacaattgcggtagagattaatttccgattaagcattcttcgctttttagcgcgaaagtgcgaaaccattgtggccaaatcaattgaaccacatcgtgtagagctacagcaaaactatagtagaaaaatacccagtgcaataacgatatatcgatggtggcttgcttttcgaaaatcagactacaaccccattagcttagcacctaatatcaaggatagaggtaatagagagacaaaagtgtcaacagttgttgattctattatggaacaggcagttgaaagagttatatctggacgaaaagtcaatgttagctctgcatataaacgtgttcgacgaaaagttcgtcaatacaatctaactcatggaacgaaatacacgtatcctaagtacgaatctgtaagaaagcgagtaaaaaagaaaaccccatttgagttattagccgcagggaaaggggagagagtagctaagagagagtttcgccgaatgggaaaaaagatcctcacgtctagcgtgctagagagggttgaaatagatcacactgtcgttgacctttttgcagtacacgaagagtatcgaatcccattgggccgaccttggcttactcaattggttgattgttacagtaaagctgtaatcggtttttatttaggtttcgagcctcctagctatgtgtcggtttcccttgcacttaagaatgcaatacaacgcaaagatgacttaatctcctcgtatgaatcgatcgagaatgaatggctatgttatggcatcccagacctactcgtaactgataatggtaaagagtttttgtcgaaagcatttgatcaagcatgtgaatcactattgatcaatgtgcatcaaaataaagttgagacgcccgacaacaaacctcatgttgaacgtaactacgggactattaatacttctctgttagacgatttacctgggaaatccttcagccagtaccttcaaagagaagggtacgactctgtgggagaagctacccttacactcaatgagattagagaaatttacttaatttggttggtggatatttatcataaaaaacccaatcagagaggcactaattgtcctaatgttgcgtggaaaaagggttgtcaagaatgggaaccagaggagttctctggttctaaagacgaattagactttaaatttgctattgttgattacaaacaacttactaaagtagggataactgtctacaaagaactgagttatagcaatgaccgtttagctgaatatagagggaagaaaggaaaccataaagttcagttcaagtataaccctgagtgtatggcagttatttgggtgttggatgaggatatgaatgagtactttacagttaatgcgattgactacgaatatgcaagtagagtatcactttggcaacataaatataacatgaaatatcaagcagaactaaattcagcagaatatgatgaggacaaggaaattgatgcagaaataaaaattgaagaaatcgcagatcgttcaattgttaagactaacaaaatcagagctcggaggcgtggcgctaggcatcaagagaatagcgcaagggctaagtcaatcagtaatgcgaacccggcctcgatacaaaaacatgaagatgaaatcgttagtgcagataatgacgattgggatattgattatgtctgagaaatcgtcaaatgagtgaaacgcgtgaggctcgtatatcaagagctaaaagggcatttgtatccacaccgagcgttaggaaaatcttgagttacatggatagatgtagagatctatcagacctagagtctgagcctacatgcatgatggtctatggtgcttcgggtgtaggtaaaacgaccgtcatcaagaaatacttaaatcaaaacagaagagagtccgaagccgggggcgatataataccggttttgcatattgagttgccagacaatgcgaagccagtagatgcagcaagggaattgctggttgaaatgggtgacccgctagcactttatgaaactgacttagctagattgacgaaaagactgactgaattaatccctgcggtcggcgtgaagctgattattatcgatgagttccaacatttggtggaagaaaggtcaaatcgggttcttacccaagtaggtaattggctaaaaatgatacttaacaaaacgaaatgtccaattgttatatttggtatgccatactcaaaagttgtactgcaagcaaactcgcaacttcacgggcgattttccattcaggttgaactgcgcccctttagctaccagggaggtagaggtgtatttaaaacttttttggaataccttgataaagccctaccttttgaaaaacaggctggcttagccaacgaaagtttgcagaaaaaattgtatgcattctctcagggaaacatgcgttcgttgagaaaccttatttatcaagcatctatcgaagcaattgataatcagcatgagacgataaccgaagaagatttcgtttttgcatcgaagttgacatcgggcgataaacccaactcatggaaaaatccttttgaggagggtgttgaggtaacagaagatatgttacgaccgccaccaaaagatattggttgggaggactatttgagacattcaaccccgagagtgagtaaaccaggtagaaataaaaactttttcgaataacctaggctgctgcgctgctgccaccgctgagcaataactagcataaccccttggggcctctaaacgggtcttgaggggttttttgctgaaacctcaggcatttgttgttgatacaaccataaaatgataattacacccataaattgataattatcacacccataaattgatattgcctcttcatggtctaaacttcagtaagtttacgacattttcctcgaggtcatttccggggatccatggagaaaaaaatcactggatataccaccgttgatatatcccaatggcatcgtaaagaacattttgaggcatttcagtcagttgctcaatgtacctataaccagaccgttcagctggatattacggcctttttaaagaccgtaaagaaaaataagcacaagttttatccggcctttattcacattcttgcccgcctgatgaatgctcatccggagttccgtatggcaatgaaagacggtgagctggtgatatgggatagtgttcacccttgttacaccgttttccatgagcaaactgaaacgttttcatcgctctggagtgaataccacgacgatttccggcagtttctacacatatattcgcaagatgtggcgtgttacggtgaaaacctggcctatttccctaaagggtttattgagaatatgtttttcgtctcagccaatccctgggtgagtttcaccagttttgatttaaacgtggccaatatggacaacttcttcgcccccgttttcactatgggcaaatattatacgcaaggcgacaaggtgctgatgccgctggcgattcaggttcatcatgccgtttgtgatggcttccatgtcggcagaatgcttaatgaattacaacagtactgcgatgagtggcagggcggggcgtaatttttttaaggcagttattggtgcccttctagagtccttactgcagtagttttgctgaaatactcgattcacaaaaatatcaacttatggttgttttgtgagatatcaatatatggttgttttgtggttaagttgctgattataaataattattaaatatcactttatggttgcatcaacaggtaccgagctcgaattcactggccgtcgttttacaacgtcgtgactgggaaaaccctggcgttacccaacttaatcgccttgctatcgtggccggatcttgcggcccctcggcttgaacgaattgttagacattatttgccgactaccttggtgatctcgcctttcacgtagtggacaaattcttccaactgatctgcgcgcgaggccaagcgatcttcttcttgtccaagataagcctgtctagcttcaagtatgacgggctgatactgggccggcaggcgctccattgcccagtcggcagcgacatccttcggcgcgattttgccggttactgcgctgtaccaaatgcgggacaacgtaagcactacatttcgctcatcgccagcccagtcgggcggcgagttccatagcgttaaggtttcatttagcgcctcaaatagatcctgttcaggaaccggatcaaagagttcctccgccgctggacctaccaaggcaacgctatgttctcttgcttttgtcagcaagatagccagatcaatgtcgatcgtggctggctcgaagatacctgcaagaatgtcattgcgctgccattctccaaattgcagttcgcgcttagctggataacgccacggaatgatgtcgtcgtgcacaacaatggtgacttctacagcgcggagaatctcgctctctccaggggaagccgaagtttccaaaaggtcgttgatcaaagctcgccgcgttgtttcatcaagccttacggtcaccgtaaccagcaaatcaatatcactgtgtggcttcaggccgccatccactgcggagccgtacaaatgtacggccagcaacgtcggttcgagatggcgctcgatgacgccaactacctctgatagttgagtcgatacttcggcgatcaccgcttccctcatactcttcctttttcaatattattgaagcatttatcagggttattgtctcatgagcggatacatatttgaatgtatttagaaaaataaacaaatagctagctcactcggtcgctacgctccgggcgtgagactgcggcgggcgctgcggacacatacaaagttacccacagattccgtggataagcaggggactaacatgtgaggcaaaacagcagggccgcgccggtggcgtttttccataggctccgccctcctgccagagttcacataaacagacgcttttccggtgcatctgtgggagccgtgaggctcaaccatgaatctgacagtacgggcgaaacccgacaggacttaaagatccccaccgtttccggcgggtcgctccctcttgcgctctcctgttccgaccctgccgtttaccggatacctgttccgcctttctcccttacgggaagtgtggcgctttctcatagctcacacactggtatctcggctcggtgtaggtcgttcgctccaagctgggctgtaagcaagaactccccgttcagcccgactgctgcgccttatccggtaactgttcacttgagtccaacccggaaaagcacggtaaaacgccactggcagcagccattggtaactgggagttcgcagaggatttgtttagctaaacacgcggttgctcttgaagtgtgcgccaaagtccggctacactggaaggacagatttggttgctgtgctctgcgaaagccagttaccacggttaagcagttccccaactgacttaaccttcgatcaaaccacctccccaggtggttttttcgtttacagggcaaaagattacgcgcagaaaaaaaggatctcaagaagatcctttgatcttttctactgaaccgctctagatttcagtgcaatttatctcttcaaatgtagcacctgaagtcagccccatacgatataagttgtaattctcatgttagtcatgccccgcgcccaccggaaggagctgactgggttgaaggctctcaagggcatcggtcgagatcccggtgcctaatgagtgagctaacttacattaattgcgttgcgctcactgcccgctttccagtcgggaaacctgtcgtgccagctgcattaatgaatcggccaacgcgcggggagaggcggtttgcgtattgggcgccagggtggtttttcttttcaccagtgagacgggcaacagctgattgcccttcaccgcctggccctgagagagttgcagcaagcggtccacgctggtttgccccagcaggcgaaaatcctgtttgatggtggttaacggcgggatataacatgagctgtcttcggtatcgtcgtatcccactaccgagatgtccgcaccaacgcgcagcccggactcggtaatggcgcgcattgcgcccagcgccatctgatcgttggcaaccagcatcgcagtgggaacgatgccctcattcagcatttgcatggtttgttgaaaaccggacatggcactccagtcgccttcccgttccgctatcggctgaatttgattgcgagtgagatatttatgccagccagccagacgcagacgcgccgagacagaacttaatgggcccgctaacagcgcgatttgctggtgacccaatgcgaccagatgctccacgcccagtcgcgtaccgtcttcatgggagaaaataatactgttgatgggtgtctggtcagagacatcaagaaataacgccggaacattagtgcaggcagcttccacagcaatggcatcctggtcatccagcggatagttaatgatcagcccactgacgcgttgcgcgagaagattgtgcaccgccgctttacaggcttcgacgccgcttcgttctaccatcgacaccaccacgctggcacccagttgatcggcgcgagatttaatcgccgcgacaatttgcgacggcgcgtgcagggccagactggaggtggcaacgccaatcagcaacgactgtttgcccgccagttgttgtgccacgcggttgggaatgtaattcagctccgccatcgccgcttccactttttcccgcgttttcgcaga

SEQ ID NO: 1758 - DNA, 12994 bp, Synthetic construct
  source 1..12994: mol_type = other DNA
aacgtggctggcctggttcaccacgcgggaaacggtctgataagagacaccggcatactctgcgacatcgtataacgttactggtttcacattcaccaccctgaattgactctcttccgggcgctatcatgccataccgcgaaaggttttgcgccattcgatggtgtccgggatctcgacgctctcccttatgcgactcctgcattaggaatggataaccgtattaccgcctttgagtgagctgataccgctcgccgcagccgaactaccgagcgcagcgagtcagtgagcgaggagcgactcctgcattaggaaattaatacgactcactataggggaattgtgagcggataacaattcccctgtagaaataattttgtttaactttaataaggagatataccatgggtgaactgccgagtaggtagctgataacagtacagcgcggctgaaatcatcattaaagcggtgaactgccgagtaggtagctgataacgcattactaagctggcgcgtgaagctgtagaagtgaactgccgagtaggtagctgataactgggaggattcataaagcattgtttgttggctgtgaactgccgagtaggtagctgataacggatccgaattcgagcgaaggagatatacatatgtttttgcaaagacctaaaccttacagcgatgaaagtttagaaagtttctttatccgagtggctaacaaaaatggctacggtgatgtccatcgcttcctagaagccactaaacgattccttcaagacattgaccataatggctatcaaacctttccgactgatataactcggataaacccatactcagctaaaaacagttccagcgcacgaactgcgtcattcctgaaacttgcacaattgacatttaatgaaccgccagagctacttgggttggcaattaacagaacaaacatgaaatactcgccgtcaactagcgcggttgttagaggtgcagaagtctttcctcgcagtttactacggacgcactccatcccctgctgtcctttgtgtctgcgagaaaatggctacgcctcctacctttggcactttcaggggtacgaatactgccacagccataacgtacctttaattaccacttgtagctgtggtaaggagtttgactaccgagtatctgggttaaagggcatttgctgcaaatgcaaggagcctatcaccttaaccagcagggagaacggtcatgaggcagcgtgtactgtttcaaactggcttgctggccatgaatctaaacctctgccaaatcttcctaaaagctaccgatggggtttagttcattggtggatgggtattaaagatagcgagttcgatcacttttcgttcgttcaatttttctcaaactggccaaggtcattccactcgataatcgaagatgaagtagagttcaaccttgagcatgctgttgtcagcacgtctgaattacgactaaaagatcttcttggtcgattgtttttcggttcaattcggttacctgagcggaatcttcaacacaatatcatccttggtgagcttctctgctatttagaaaatcgtttatggcaagacaagggattaatcgccaacctcaaaatgaacgcgttagaggcgactgtaatgttaaattgtagcctcgatcagattgcatcaatggttgaacaacgcatcttgaagccaaatcgaaaaagcaagcccaacagccctcttgatgttaccgattatctatttcatttcggcgatattttctgtctttggttagctgagttccaaagcgatgagtttaaccgttcgttttatgtgtcgaggtggtaaatgcaaactctgaaagaactaatcgcatccaatcctgacgacttaacaactgaacttaagagagcatttcgtccactcacaccgcatattgcaattgatggtaatgaacttgacgcactgacgatattagtcaatttaaccgataagactgatgatcagaaagacctgctcgatcgagccaaatgcaagcaaaaacttcgagatgaaaaatggtgggctagctgcataaattgcgttaattacagacaaagccataacccaaaattcccggatatacgttctgaaggcgtgattcgaacccaagccctgggtgaattaccgagtttcctactctcgtcctcaaaaatcccaccataccattggtcatatagccatgattcaaaatacgtcaacaaaagcgcattcctcaccaatgagttttgttgggatggtgagatctcatgtttgggtgagcttcttaaagatgcagatcacccactttggaatactttgaaaaagttaggttgttctcaaaaaacttgcaaagcaatggcaaaacaactagctgatattactctcacgactatcaatgtcacactcgcaccaaattacctgactcaaatatctctccccgatagtgatacatcctacatttcactctctcctgttgcatcgctatcgatgcaaagccactttcatcagaggctccaagatgaaaatcggcatagcgcgataacgcggtttagccgaactaccaacatgggggtcactgcgatgacatgtggcggcgcatttagaatgttaaagtctggcgctaagttttccagcccccctcatcaccgattaaacagtaaacgaagttggttgacgtcagagcatgttcagtcattaaaacagtaccagcgcctcaacaaaagcctcatacctgaaaactctcggattgcactccgtagaaaatacaaaatcgagcttcaaaatatggtcagatcttggtttgcaatgcaagaccatacccttgattcgaacatacttatccaacatttgaatcatgacctatcttacttaggagccacaaaacgttttgcatacgatccagcgatgaccaagctctttactgagcttttgaaacgagagttatcaaattcaatcaataatggtgagcaacacactaatggatcgtttttagtcctaccgaatatcagggtttgtggcgcaacagctttaagctccccggtaacggtggggattccatcacttacagctttctttggcttcgttcacgcatttgaacggaatataaatcgcaccacctcatcgtttcgtgttgaatcctttgcgatatgcgtccatcaactacatgtcgagaagcgaggtttgacagcagagtttgtggaaaaaggcgacgggactatatccgctcccgcgacccgggatgactggcagtgtgatgtcgtatttagccttattttgaacaccaactttgctcaacatattgaccaagatacgttagttacatcactaccaaagcgattggctcggggttcagcaaaaattgcgattgatgactttaaacatatcaactcattctcgacattagaaacagcgatcgaatctctgccaatagaagctggtaggtggttatcactttacgcacagtcaaacaataatctaagtgatctattagcagccatgacagaggaccatcagctcatggcaagctgcgtcggttaccacttgttagaagagcccaaagataaaccaaactccctcagaggttacaaacacgctatcgccgagtgcatcattggactcattaactcaatcacctttagctcagagactgatcccaacacaatcttttggtcgctaaagaactatcaaaactacctagtggtacagccaaggagtatcaacgatgaaactaccgacaaatctagcctatgagcgctctatcgacccatcagatgtctgtttttttgtcgtctggcccgatgatagaaaaacacctttaacctacaattctcgtactctgctcgggcaaatggaagcggcatcattagcctatgatgtctcaggtcaaccaataaaaagtgccaccgctgaggcgttagctcaagggaaccctcatcaagttgatttctgccacgttccatacggtgcgagtcatattgaatgcagtttctccgtctcgttttcttctgaactacgtcaaccatataagtgtaactcaagcaaagttaaacaaacgctagtgcaattagtcgagctctacgaaacgaaaatcggctggactgagctagcaacccgatatttgatgaacatttgcaacggtaaatggctgtggaaaaatacccgtaaagcctattgctggaacattgtacttacaccttggccttggaacggggaaaaggttggatttgaagatattcgtactaactacacctcacggcaagactttaaaaataataaaaattggtctgctatagttgaaatgatcaaaaccgcattttctagtactgatgggctggcgatatttgaagtcagggccaccttgcacttgccaacgaatgctatggtgcggccaagccaagttttcacagaaaaagaaagtggcagtaaaagtaaatctaaaactcaaaacagtcgagtttttcagagtacaactattgatggtgaacgatcgccaatactaggggcctttaaaacgggagcagctattgcaaccattgacgactggtatcctgaagccactgagccactaagggtcggacggtttggggttcatcgcgaagatgtcacttgctaccgtcatccgtctaccggaaaagattttttctcgatattacaacaagcagagcactatattgaagtgttgagcgccaacaaaactcccgctcaagaaactatcaacgacatgcactttttaatggctaacctgattaagggtgggatgttccagcataaaggagactgactgtgaaatggtattataagacaatcacctttctgccagagttgtgcaacaacgagtcactggctgcaaagtgtctccgcgttctgcatggatttaactatcagtatgagacacgaaatatcggcgtttcatttccgctttggtgtgatgcaacggttggaaaaaagatttcatttgtcagcaagaacaagatagaactcgacttactacttaaacaacactatttcgtccaaatggaacaacttcaatactttcatatatccaacactgttctcgtcccagaagattgtacatacgtttcctttagacgctgtcaatctatagataagctcacagcagcagggctggcaaggaaaatcagacgcctggagaaacgtgctctatctagaggcgagcaatttgacccatcatcttttgctcaaaaagagcatactgcaatagcgcactaccactcacttggggagtccagcaaacagacgaaccgcaactttcgactcaatatcaggatgctctcggagcaaccccgtgaggggaactcgatttttagtagctatggcttatcaaattcagaaaactcgtttcagcctgtacccttaatctgacctttaataaggagatataccatggcgacaagtttacctacgccctcagcaattacgacttcggcgttagagtatgcattccatactcccgctcgcaatctaacgaaatctcgcggaaaaaacattcatcgttatgtcagtgtaaagatgagtaagaggattacggtagaatctactctagagtgtgatgcctgctatcactttgattttgagccaagtattgttcgcttttgcgctcaaccgattcgatttttatattatctcaatggtcagtctcactcctatgttcctgactttctagttcaatttgataccaacgagtttgttctatatgaagtaaagtcagcttatgctaagaacaaacctgattttgatgttgaatgggaggcgaaagtaaaagcagcaactgaactagggctagaattggagcttgttgaagagagtgatattagggatacggttgtattaaataatcttaagcgcatgcatcgttatgcttcgaaagatgagctgaataacgtacataactctctcttaaaaataataaagtacaatggcgcccaatctgcaagatgcttgggagaacagttgggtttaaaaggccgaactgttttaccaattttgtgcgatttgctgtcaaggtgtttactcgatacacgtttggataagcctctatctcttgaatctcgatttgagttggccagttatggctaagaaagggttctcaagtttccatagaaaagcagtctcttcccaagatacgcttgaatcgatagagcttgtctctagcgctaattgtctagaaagtgttacgtatcaagatatatcagcatttcccgaaacaattgcggtagagattaatttccgattaagcattcttcgctttttagcgcgaaagtgcgaaaccattgtggccaaatcaattgaaccacatcgtgtagagctacagcaaaactatagtagaaaaatacccagtgcaataacgatatatcgatggtggcttgcttttcgaaaatcagactacaaccccattagcttagcacctaatatcaaggatagaggtaatagagagacaaaagtgtcaacagttgttgattctattatggaacaggcagttgaaagagttatatctggacgaaaagtcaatgttagctctgcatataaacgtgttcgacgaaaagttcgtcaatacaatctaactcatggaacgaaatacacgtatcctaagtacgaatctgtaagaaagcgagtaaaaaagaaaaccccatttgagttattagccgcagggaaaggggagagagtagctaagagagagtttcgccgaatgggaaaaaagatcctcacgtctagcgtgctagagagggttgaaatagatcacactgtcgttgacctttttgcagtacacgaagagtatcgaatcccattgggccgaccttggcttactcaattggttgattgttacagtaaagctgtaatcggtttttatttaggtttcgagcctcctagctatgtgtcggtttcccttgcacttaagaatgcaatacaacgcaaagatgacttaatctcctcgtatgaatcgatcgagaatgaatggctatgttatggcatcccagacctactcgtaactgataatggtaaagagtttttgtcgaaagcatttgatcaagcatgtgaatcactattgatcaatgtgcatcaaaataaagttgagacgcccgacaacaaacctcatgttgaacgtaactacgggactattaatacttctctgttagacgatttacctgggaaatccttcagccagtaccttcaaagagaagggtacgactctgtgggagaagctacccttacactcaatgagattagagaaatttacttaatttggttggtggatatttatcataaaaaacccaatcagagaggcactaattgtcctaatgttgcgtggaaaaagggttgtcaagaatgggaaccagaggagttctctggttctaaagacgaattagactttaaatttgctattgttgattacaaacaacttactaaagtagggataactgtctacaaagaactgagttatagcaatgaccgtttagctgaatatagagggaagaaaggaaaccataaagttcagttcaagtataaccctgagtgtatggcagttatttgggtgttggatgaggatatgaatgagtactttacagttaatgcgattgactacgaatatgcaagtagagtatcactttggcaacataaatataacatgaaatatcaagcagaactaaattcagcagaatatgatgaggacaaggaaattgatgcagaaataaaaattgaagaaatcgcagatcgttcaattgttaagactaacaaaatcagagctcggaggcgtggcgctaggcatcaagagaatagcgcaagggctaagtcaatcagtaatgcgaacccggcctcgatacaaaaacatgaagatgaaatcgttagtgcagataatgacgattgggatattgattatgtctgagaaatcgtcaaatgagtgaaacgcgtgaggctcgtatatcaagagctaaaagggcatttgtatccacaccgagcgttaggaaaatcttgagttacatggatagatgtagagatctatcagacctagagtctgagcctacatgcatgatggtctatggtgcttcgggtgtaggtaaaacgaccgtcatcaagaaatacttaaatcaaaacagaagagagtccgaagccgggggcgatataataccggttttgcatattgagttgccagacaatgcgaagccagtagatgcagcaagggaattgctggttgaaatgggtgacccgctagcactttatgaaactgacttagctagattgacgaaaagactgactgaattaatccctgcggtcggcgtgaagctgattattatcgatgagttccaacatttggtggaagaaaggtcaaatcgggttcttacccaagtaggtaattggctaaaaatgatacttaacaaaacgaaatgtccaattgttatatttggtatgccatactcaaaagttgtactgcaagcaaactcgcaacttcacgggcgattttccattcaggttgaactgcgcccctttagctaccagggaggtagaggtgtatttaaaacttttttggaataccttgataaagccctaccttttgaaaaacaggctggcttagccaacgaaagtttgcagaaaaaattgtatgcattctctcagggaaacatgcgttcgttgagaaaccttatttatcaagcatctatcgaagcaattgataatcagcatgagacgataaccgaagaagatttcgtttttgcatcgaagttgacatcgggcgataaacccaactcatggaaaaatccttttgaggagggtgttgaggtaacagaagatatgttacgaccgccaccaaaagatattggttgggaggactatttgagacattcaaccccgagagtgagtaaaccaggtagaaataaaaactttttcgaataacctaggctgctgcgctgctgccaccgctgagcaataactagcataaccccttggggcctctaaacgggtcttgaggggttttttgctgaaacctcaggcatttgttgttgatacaaccataaaatgataattacacccataaattgataattatcacacccataaattgatattgcctcttcatggtctaaacttcagtaagtttacgacattttcctcgaggtcatttccggggatccatggagaaaaaaatcactggatataccaccgttgatatatcccaatggcatcgtaaagaacattttgaggcatttcagtcagttgctcaatgtacctataaccagaccgttcagctggatattacggcctttttaaagaccgtaaagaaaaataagcacaagttttatccggcctttattcacattcttgcccgcctgatgaatgctcatccggagttccgtatggcaatgaaagacggtgagctggtgatatgggatagtgttcacccttgttacaccgttttccatgagcaaactgaaacgttttcatcgctctggagtgaataccacgacgatttccggcagtttctacacatatattcgcaagatgtggcgtgttacggtgaaaacctggcctatttccctaaagggtttattgagaatatgtttttcgtctcagccaatccctgggtgagtttcaccagttttgatttaaacgtggccaatatggacaacttcttcgcccccgttttcactatgggcaaatattatacgcaaggcgacaaggtgctgatgccgctggcgattcaggttcatcatgccgtttgtgatggcttccatgtcggcagaatgcttaatgaattacaacagtactgcgatgagtggcagggcggggcgtaatttttttaaggcagttattggtgcccttctagagtccttactgcagtagttttgctgaaatactcgattcacaaaaatatcaacttatggttgttttgtgagatatcaatatatggttgttttgtggttaagttgctgattataaataattattaaatatcactttatggttgcatcaacaggtaccgagctcgaattcactggccgtcgttttacaacgtcgtgactgggaaaaccctggcgttacccaacttaatcgccttgctatcgtggccggatcttgcggcccctcggcttgaacgaattgttagacattatttgccgactaccttggtgatctcgcctttcacgtagtggacaaattcttccaactgatctgcgcgcgaggccaagcgatcttcttcttgtccaagataagcctgtctagcttcaagtatgacgggctgatactgggccggcaggcgctccattgcccagtcggcagcgacatccttcggcgcgattttgccggttactgcgctgtaccaaatgcgggacaacgtaagcactacatttcgctcatcgccagcccagtcgggcggcgagttccatagcgttaaggtttcatttagcgcctcaaatagatcctgttcaggaaccggatcaaagagttcctccgccgctggacctaccaaggcaacgctatgttctcttgcttttgtcagcaagatagccagatcaatgtcgatcgtggctggctcgaagatacctgcaagaatgtcattgcgctgccattctccaaattgcagttcgcgcttagctggataacgccacggaatgatgtcgtcgtgcacaacaatggtgacttctacagcgcggagaatctcgctctctccaggggaagccgaagtttccaaaaggtcgttgatcaaagctcgccgcgttgtttcatcaagccttacggtcaccgtaaccagcaaatcaatatcactgtgtggcttcaggccgccatccactgcggagccgtacaaatgtacggccagcaacgtcggttcgagatggcgctcgatgacgccaactacctctgatagttgagtcgatacttcggcgatcaccgcttccctcatactcttcctttttcaatattattgaagcatttatcagggttattgtctcatgagcggatacatatttgaatgtatttagaaaaataaacaaatagctagctcactcggtcgctacgctccgggcgtgagactgcggcgggcgctgcggacacatacaaagttacccacagattccgtggataagcaggggactaacatgtgaggcaaaacagcagggccgcgccggtggcgtttttccataggctccgccctcctgccagagttcacataaacagacgcttttccggtgcatctgtgggagccgtgaggctcaaccatgaatctgacagtacgggcgaaacccgacaggacttaaagatccccaccgtttccggcgggtcgctccctcttgcgctctcctgttccgaccctgccgtttaccggatacctgttccgcctttctcccttacgggaagtgtggcgctttctcatagctcacacactggtatctcggctcggtgtaggtcgttcgctccaagctgggctgtaagcaagaactccccgttcagcccgactgctgcgccttatccggtaactgttcacttgagtccaacccggaaaagcacggtaaaacgccactggcagcagccattggtaactgggagttcgcagaggatttgtttagctaaacacgcggttgctcttgaagtgtgcgccaaagtccggctacactggaaggacagatttggttgctgtgctctgcgaaagccagttaccacggttaagcagttccccaactgacttaaccttcgatcaaaccacctccccaggtggttttttcgtttacagggcaaaagattacgcgcagaaaaaaaggatctcaagaagatcctttgatcttttctactgaaccgctctagatttcagtgcaatttatctcttcaaatgtagcacctgaagtcagccccatacgatataagttgtaattctcatgttagtcatgccccgcgcccaccggaaggagctgactgggttgaaggctctcaagggcatcggtcgagatcccggtgcctaatgagtgagctaacttacattaattgcgttgcgctcactgcccgctttccagtcgggaaacctgtcgtgccagctgcattaatgaatcggccaacgcgcggggagaggcggtttgcgtattgggcgccagggtggtttttcttttcaccagtgagacgggcaacagctgattgcccttcaccgcctggccctgagagagttgcagcaagcggtccacgctggtttgccccagcaggcgaaaatcctgtttgatggtggttaacggcgggatataacatgagctgtcttcggtatcgtcgtatcccactaccgagatgtccgcaccaacgcgcagcccggactcggtaatggcgcgcattgcgcccagcgccatctgatcgttggcaaccagcatcgcagtgggaacgatgccctcattcagcatttgcatggtttgttgaaaaccggacatggcactccagtcgccttcccgttccgctatcggctgaatttgattgcgagtgagatatttatgccagccagccagacgcagacgcgccgagacagaacttaatgggcccgctaacagcgcgatttgctggtgacccaatgcgaccagatgctccacgcccagtcgcgtaccgtcttcatgggagaaaataatactgttgatgggtgtctggtcagagacatcaagaaataacgccggaacattagtgcaggcagcttccacagcaatggcatcctggtcatccagcggatagttaatgatcagcccactgacgcgttgcgcgagaagattgtgcaccgccgctttacaggcttcgacgccgcttcgttctaccatcgacaccaccacgctggcacccagttgatcggcgcgagatttaatcgccgcgacaatttgcgacggcgcgtgcagggccagactggaggtggcaacgccaatcagcaacgactgtttgcccgccagttgttgtgccacgcggttgggaatgtaattcagctccgccatcgccgcttccactttttcccgcgttttcgcaga

SEQ ID NO: 1759 - DNA, 14098 bp, Synthetic construct
  source 1..14098: mol_type = other DNA
ccgccgtgggtttcctcgcaataagcccggcccacgcctcatgcgctttgcgttccgtttgcacccagtgaccgggcttgttcttggcttgaatgccgatttctctggactgcgtggccatgcttatctccatgcggtaggggtgccgcacggttgcggcaccatgcgcaatcagctgcaacttttcggcagcgcgacaacaattatgcgttgcgtaaaagtggcagtcaattacagattttctttaacctacgcaatgagctattgcggggggtgccgcaatgagctgttgcgtaccccccttttttaagttgttgatttttaagtctttcgcatttcgccctatatctagttctttggtgcccaaagaagggcacccctgcggggttcccccacgccttcggcgcggctccccctccggcaaaaagtggcccctccggggcttgttgatcgactgcgcggccttcggccttgcccaaggtggcgctgcccccttggaacccccgcactcgccgccgtgaggctcggggggcaggcgggcgggcttcgcccttcgactgcccccactcgcataggcttgggtcgttccaggcgcgtcaaggccaagccgctgcgcggtcgctgcgcgagccttgacccgccttccacttggtgtccaaccggcaagcgaagcgcgcaggccgcaggccggaggcttttccccagagaaaattaaaaaaattgatggggcaaggccgcaggccgcgcagttggagccggtgggtatgtggtcgaaggctgggtagccggtgggcaatccctgtggtcaagctcgtgggcaggcgcagcctgtccatcagcttgtccagcagggttgtccacgggccgagcgaagcgagccagccggtggccgctcgcggccatcgtccacatatccacgggctggcaagggagcgcagcgaccgcgcagggcgaagcccggagagcaagcccgtagggcgccgcagccgccgtaggcggtcacgactttgcgaagcaaagtctagtgagtatactcaagcattgagtggcccgccggaggcaccgccttgcgctgcccccgtcgagccggttggacaccaaaagggaggggcaggcatggcggcatacgcgatcatgcgatgcaagaagctggcgaaaatgggcaacgtggcggccagtctcaagcacgcctaccgcgagcgcgagacgcccaacgctgacgccagcaggacgccagagaacgagcactgggcggccagcagcaccgatgaagcgatgggccgactgcgcgagttgctgccagagaagcggcgcaaggacgctgtgttggcggtcgagtacgtcatgacggccagcccggaatggtggaagtcggccagccaagaacagcaggcggcgttcttcgagaaggcgcacaagtggctggcggacaagtacggggcggatcgcatcgtgacggccagcatccaccgtgacgaaaccagcccgcacatgaccgcgttcgtggtgccgctgacgcaggacggcaggctgtcggccaaggagttcatcggcaacaaagcgcagatgacccgcgaccagaccacgtttgcggccgctgtggccgatctagggctgcaacggggcatcgagggcagcaaggcacgtcacacgcgcattcaggcgttctacgaggccctggagcggccaccagtgggccacgtcaccatcagcccgcaagcggtcgagccacgcgcctatgcaccgcagggattggccgaaaagctgggaatctcaaagcgcgttgagacgccggaagccgtggccgaccggctgacaaaagcggttcggcaggggtatgagcctgccctacaggccgccgcaggagcgcgtgagatgcgcaagaaggccgatcaagcccaagagacggcccgtgaccttcgggagcgcctgaagcccgttctggacgccctggggccgttgaatcgggatatgcaggccaaggccgccgcgatcatcaaggccgtgggcgaaaagctgctgacggaacagcgggaagtccagcgccagaaacaggcccagcgccagcaggaacgcgggcgcgcacatttccccgaaaagtgccacctgggatgaatgtcagctactgggctatctggacaagggaaaacgcaagcgcaaagagaaagcaggtagcttgcagtgggcttacatggcgatagctagactgggcggttttatggacagcaagcgaaccggaattgccagctggggcgccctctggtaaggttgggaagccctgcaaagtaaactggatggctttcttgccgccaaggatctgatggcgcaggggatcaagatctgatcaagagacaggatgaggatcgtttcgcatgattgaacaagatggattgcacgcaggttctccggccgcttgggtggagaggctattcggctatgactgggcacaacagacaatcggctgctctgatgccgccgtgttccggctgtcagcgcaggggcgcccggttctttttgtcaagaccgacctgtccggtgccctgaatgaactgcaagacgaggcagcgcggctatcgtggctggccacgacgggcgttccttgcgcagctgtgctcgacgttgtcactgaagcgggaagggactggctgctattgggcgaagtgccggggcaggatctcctgtcatctcaccttgctcctgccgagaaagtatccatcatggctgatgcaatgcggcggctgcatacgcttgatccggctacctgcccattcgaccaccaagcgaaacatcgcatcgagcgagcacgtactcggatggaagccggtcttgtcgatcaggatgatctggacgaagagcatcaggggctcgcgccagccgaactgttcgccaggctcaaggcgcgcatgcccgacggcgaggatctcgtcgtgacccatggcgatgcctgcttgccgaatatcatggtggaaaatggccgcttttctggattcatcgactgtggccggctgggtgtggcggaccgctatcaggacatagcgttggctacccgtgatattgctgaagagcttggcggcgaatgggctgaccgcttcctcgtgctttacggtatcgccgctcccgattcgcagcgcatcgccttctatcgccttcttgacgagttcttctgagcgggactctggggttcgaaatgaccgaccaagcgacgcccaacctgccatcacgagatttcgattccaccgccgccttctatgaaaggttgggcttcggaatcgttttccgggacgccggctggatgatcctccagcgcggggatctcatgctggagttcttcgcccacccccatgggcaaatattatacgcaaggcgacaaggtgctgatgccgctggcgattcaggttcatcatgccgtttgtgatggcttccatgtcggcagaatgcttaatgaattacaacagtttttatgcatgcgcccaatacgcaaaccgcctctccccgcgcgttggccgattcattaatgcagctggcacgacaggtttcccgactggtggataaccgtattaccgcctttgagtgagctgataccgctcgccgcagccgaacgaccgagcgcagcgagtcagtgagcgaggacacaagctttgacagctagctcagtcctaggtataatactagcgtcgacctttaataaggagatataccatgggtgaactgccgagtaggtagctgataacgcacgacctgccggaattcagcctgactgaaagtgaactgccgagtaggtagctgataactggcccagttggtcgagcatatcaacagaaccgtgaactgccgagtaggtagctgataacggatccgaattcgagcgaaggagatatacatatgtttttgcaaagacctaaaccttacagcgatgaaagtttagaaagtttctttatccgagtggctaacaaaaatggctacggtgatgtccatcgcttcctagaagccactaaacgattccttcaagacattgaccataatggctatcaaacctttccgactgatataactcggataaacccatactcagctaaaaacagttccagcgcacgaactgcgtcattcctgaaacttgcacaattgacatttaatgaaccgccagagctacttgggttggcaattaacagaacaaacatgaaatactcgccgtcaactagcgcggttgttagaggtgcagaagtctttcctcgcagtttactacggacgcactccatcccctgctgtcctttgtgtctgcgagaaaatggctacgcctcctacctttggcactttcaggggtacgaatactgccacagccataacgtacctttaattaccacttgtagctgtggtaaggagtttgactaccgagtatctgggttaaagggcatttgctgcaaatgcaaggagcctatcaccttaaccagcagggagaacggtcatgaggcagcgtgtactgtttcaaactggcttgctggccatgaatctaaacctctgccaaatcttcctaaaagctaccgatggggtttagttcattggtggatgggtattaaagatagcgagttcgatcacttttcgttcgttcaatttttctcaaactggccaaggtcattccactcgataatcgaagatgaagtagagttcaaccttgagcatgctgttgtcagcacgtctgaattacgactaaaagatcttcttggtcgattgtttttcggttcaattcggttacctgagcggaatcttcaacacaatatcatccttggtgagcttctctgctatttagaaaatcgtttatggcaagacaagggattaatcgccaacctcaaaatgaacgcgttagaggcgactgtaatgttaaattgtagcctcgatcagattgcatcaatggttgaacaacgcatcttgaagccaaatcgaaaaagcaagcccaacagccctcttgatgttaccgattatctatttcatttcggcgatattttctgtctttggttagctgagttccaaagcgatgagtttaaccgttcgttttatgtgtcgaggtggtaaatgcaaactctgaaagaactaatcgcatccaatcctgacgacttaacaactgaacttaagagagcatttcgtccactcacaccgcatattgcaattgatggtaatgaacttgacgcactgacgatattagtcaatttaaccgataagactgatgatcagaaagacctgctcgatcgagccaaatgcaagcaaaaacttcgagatgaaaaatggtgggctagctgcataaattgcgttaattacagacaaagccataacccaaaattcccggatatacgttctgaaggcgtgattcgaacccaagccctgggtgaattaccgagtttcctactctcgtcctcaaaaatcccaccataccattggtcatatagccatgattcaaaatacgtcaacaaaagcgcattcctcaccaatgagttttgttgggatggtgagatctcatgtttgggtgagcttcttaaagatgcagatcacccactttggaatactttgaaaaagttaggttgttctcaaaaaacttgcaaagcaatggcaaaacaactagctgatattactctcacgactatcaatgtcacactcgcaccaaattacctgactcaaatatctctccccgatagtgatacatcctacatttcactctctcctgttgcatcgctatcgatgcaaagccactttcatcagaggctccaagatgaaaatcggcatagcgcgataacgcggtttagccgaactaccaacatgggggtcactgcgatgacatgtggcggcgcatttagaatgttaaagtctggcgctaagttttccagcccccctcatcaccgattaaacagtaaacgaagttggttgacgtcagagcatgttcagtcattaaaacagtaccagcgcctcaacaaaagcctcatacctgaaaactctcggattgcactccgtagaaaatacaaaatcgagcttcaaaatatggtcagatcttggtttgcaatgcaagaccatacccttgattcgaacatacttatccaacatttgaatcatgacctatcttacttaggagccacaaaacgttttgcatacgatccagcgatgaccaagctctttactgagcttttgaaacgagagttatcaaattcaatcaataatggtgagcaacacactaatggatcgtttttagtcctaccgaatatcagggtttgtggcgcaacagctttaagctccccggtaacggtggggattccatcacttacagctttctttggcttcgttcacgcatttgaacggaatataaatcgcaccacctcatcgtttcgtgttgaatcctttgcgatatgcgtccatcaactacatgtcgagaagcgaggtttgacagcagagtttgtggaaaaaggcgacgggactatatccgctcccgcgacccgggatgactggcagtgtgatgtcgtatttagccttattttgaacaccaactttgctcaacatattgaccaagatacgttagttacatcactaccaaagcgattggctcggggttcagcaaaaattgcgattgatgactttaaacatatcaactcattctcgacattagaaacagcgatcgaatctctgccaatagaagctggtaggtggttatcactttacgcacagtcaaacaataatctaagtgatctattagcagccatgacagaggaccatcagctcatggcaagctgcgtcggttaccacttgttagaagagcccaaagataaaccaaactccctcagaggttacaaacacgctatcgccgagtgcatcattggactcattaactcaatcacctttagctcagagactgatcccaacacaatcttttggtcgctaaagaactatcaaaactacctagtggtacagccaaggagtatcaacgatgaaactaccgacaaatctagcctatgagcgctctatcgacccatcagatgtctgtttttttgtcgtctggcccgatgatagaaaaacacctttaacctacaattctcgtactctgctcgggcaaatggaagcggcatcattagcctatgatgtctcaggtcaaccaataaaaagtgccaccgctgaggcgttagctcaagggaaccctcatcaagttgatttctgccacgttccatacggtgcgagtcatattgaatgcagtttctccgtctcgttttcttctgaactacgtcaaccatataagtgtaactcaagcaaagttaaacaaacgctagtgcaattagtcgagctctacgaaacgaaaatcggctggactgagctagcaacccgatatttgatgaacatttgcaacggtaaatggctgtggaaaaatacccgtaaagcctattgctggaacattgtacttacaccttggccttggaacggggaaaaggttggatttgaagatattcgtactaactacacctcacggcaagactttaaaaataataaaaattggtctgctatagttgaaatgatcaaaaccgcattttctagtactgatgggctggcgatatttgaagtcagggccaccttgcacttgccaacgaatgctatggtgcggccaagccaagttttcacagaaaaagaaagtggcagtaaaagtaaatctaaaactcaaaacagtcgagtttttcagagtacaactattgatggtgaacgatcgccaatactaggggcctttaaaacgggagcagctattgcaaccattgacgactggtatcctgaagccactgagccactaagggtcggacggtttggggttcatcgcgaagatgtcacttgctaccgtcatccgtctaccggaaaagattttttctcgatattacaacaagcagagcactatattgaagtgttgagcgccaacaaaactcccgctcaagaaactatcaacgacatgcactttttaatggctaacctgattaagggtgggatgttccagcataaaggagactgactgtgaaatggtattataagacaatcacctttctgccagagttgtgcaacaacgagtcactggctgcaaagtgtctccgcgttctgcatggatttaactatcagtatgagacacgaaatatcggcgtttcatttccgctttggtgtgatgcaacggttggaaaaaagatttcatttgtcagcaagaacaagatagaactcgacttactacttaaacaacactatttcgtccaaatggaacaacttcaatactttcatatatccaacactgttctcgtcccagaagattgtacatacgtttcctttagacgctgtcaatctatagataagctcacagcagcagggctggcaaggaaaatcagacgcctggagaaacgtgctctatctagaggcgagcaatttgacccatcatcttttgctcaaaaagagcatactgcaatagcgcactaccactcacttggggagtccagcaaacagacgaaccgcaactttcgactcaatatcaggatgctctcggagcaaccccgtgaggggaactcgatttttagtagctatggcttatcaaattcagaaaactcgtttcagcctgtacccttaatctgacctttaataaggagatataccatggcgacaagtttacctacgccctcagcaattacgacttcggcgttagagtatgcattccatactcccgctcgcaatctaacgaaatctcgcggaaaaaacattcatcgttatgtcagtgtaaagatgagtaagaggattacggtagaatctactctagagtgtgatgcctgctatcactttgattttgagccaagtattgttcgcttttgcgctcaaccgattcgatttttatattatctcaatggtcagtctcactcctatgttcctgactttctagttcaatttgataccaacgagtttgttctatatgaagtaaagtcagcttatgctaagaacaaacctgattttgatgttgaatgggaggcgaaagtaaaagcagcaactgaactagggctagaattggagcttgttgaagagagtgatattagggatacggttgtattaaataatcttaagcgcatgcatcgttatgcttcgaaagatgagctgaataacgtacataactctctcttaaaaataataaagtacaatggcgcccaatctgcaagatgcttgggagaacagttgggtttaaaaggccgaactgttttaccaattttgtgcgatttgctgtcaaggtgtttactcgatacacgtttggataagcctctatctcttgaatctcgatttgagttggccagttatggctaagaaagggttctcaagtttccatagaaaagcagtctcttcccaagatacgcttgaatcgatagagcttgtctctagcgctaattgtctagaaagtgttacgtatcaagatatatcagcatttcccgaaacaattgcggtagagattaatttccgattaagcattcttcgctttttagcgcgaaagtgcgaaaccattgtggccaaatcaattgaaccacatcgtgtagagctacagcaaaactatagtagaaaaatacccagtgcaataacgatatatcgatggtggcttgcttttcgaaaatcagactacaaccccattagcttagcacctaatatcaaggatagaggtaatagagagacaaaagtgtcaacagttgttgattctattatggaacaggcagttgaaagagttatatctggacgaaaagtcaatgttagctctgcatataaacgtgttcgacgaaaagttcgtcaatacaatctaactcatggaacgaaatacacgtatcctaagtacgaatctgtaagaaagcgagtaaaaaagaaaaccccatttgagttattagccgcagggaaaggggagagagtagctaagagagagtttcgccgaatgggaaaaaagatcctcacgtctagcgtgctagagagggttgaaatagatcacactgtcgttgacctttttgcagtacacgaagagtatcgaatcccattgggccgaccttggcttactcaattggttgattgttacagtaaagctgtaatcggtttttatttaggtttcgagcctcctagctatgtgtcggtttcccttgcacttaagaatgcaatacaacgcaaagatgacttaatctcctcgtatgaatcgatcgagaatgaatggctatgttatggcatcccagacctactcgtaactgataatggtaaagagtttttgtcgaaagcatttgatcaagcatgtgaatcactattgatcaatgtgcatcaaaataaagttgagacgcccgacaacaaacctcatgttgaacgtaactacgggactattaatacttctctgttagacgatttacctgggaaatccttcagccagtaccttcaaagagaagggtacgactctgtgggagaagctacccttacactcaatgagattagagaaatttacttaatttggttggtggatatttatcataaaaaacccaatcagagaggcactaattgtcctaatgttgcgtggaaaaagggttgtcaagaatgggaaccagaggagttctctggttctaaagacgaattagactttaaatttgctattgttgattacaaacaacttactaaagtagggataactgtctacaaagaactgagttatagcaatgaccgtttagctgaatatagagggaagaaaggaaaccataaagttcagttcaagtataaccctgagtgtatggcagttatttgggtgttggatgaggatatgaatgagtactttacagttaatgcgattgactacgaatatgcaagtagagtatcactttggcaacataaatataacatgaaatatcaagcagaactaaattcagcagaatatgatgaggacaaggaaattgatgcagaaataaaaattgaagaaatcgcagatcgttcaattgttaagactaacaaaatcagagctcggaggcgtggcgctaggcatcaagagaatagcgcaagggctaagtcaatcagtaatgcgaacccggcctcgatacaaaaacatgaagatgaaatcgttagtgcagataatgacgattgggatattgattatgtctgagaaatcgtcaaatgagtgaaacgcgtgaggctcgtatatcaagagctaaaagggcatttgtatccacaccgagcgttaggaaaatcttgagttacatggatagatgtagagatctatcagacctagagtctgagcctacatgcatgatggtctatggtgcttcgggtgtaggtaaaacgaccgtcatcaagaaatacttaaatcaaaacagaagagagtccgaagccgggggcgatataataccggttttgcatattgagttgccagacaatgcgaagccagtagatgcagcaagggaattgctggttgaaatgggtgacccgctagcactttatgaaactgacttagctagattgacgaaaagactgactgaattaatccctgcggtcggcgtgaagctgattattatcgatgagttccaacatttggtggaagaaaggtcaaatcgggttcttacccaagtaggtaattggctaaaaatgatacttaacaaaacgaaatgtccaattgttatatttggtatgccatactcaaaagttgtactgcaagcaaactcgcaacttcacgggcgattttccattcaggttgaactgcgcccctttagctaccagggaggtagaggtgtatttaaaacttttttggaataccttgataaagccctaccttttgaaaaacaggctggcttagccaacgaaagtttgcagaaaaaattgtatgcattctctcagggaaacatgcgttcgttgagaaaccttatttatcaagcatctatcgaagcaattgataatcagcatgagacgataaccgaagaagatttcgtttttgcatcgaagttgacatcgggcgataaacccaactcatggaaaaatccttttgaggagggtgttgaggtaacagaagatatgttacgaccgccaccaaaagatattggttgggaggactatttgagacattcaaccccgagagtgagtaaaccaggtagaaataaaaactttttcgaataacctaggctgctgcgctgctgccaccgctgagcaataactagcataaccccttggggcctctaaacgggtcttgaggggttttttgctgaaacctcaggcatttgttgttgatacaaccataaaatgataattacacccataaattgataattatcacacccataaattgatattgcctcttcatggtctaaacttcagtaagtttacgacattttcctcgaggtcatttccggggatccatggagaaaaaaatcactggatataccaccgttgatatatcccaatggcatcgtaaagaacattttgaggcatttcagtcagttgctcaatgtacctataaccagaccgttcagctggatattacggcctttttaaagaccgtaaagaaaaataagcacaagttttatccggcctttattcacattcttgcccgcctgatgaatgctcatccggagttccgtatggcaatgaaagacggtgagctggtgatatgggatagtgttcacccttgttacaccgttttccatgagcaaactgaaacgttttcatcgctctggagtgaataccacgacgatttccggcagtttctacacatatattcgcaagatgtggcgtgttacggtgaaaacctggcctatttccctaaagggtttattgagaatatgtttttcgtctcagccaatccctgggtgagtttcaccagttttgatttaaacgtggccaatatggacaacttcttcgcccccgttttcactatgggcaaatattatacgcaaggcgacaaggtgctgatgccgctggcgattcaggttcatcatgccgtttgtgatggcttccatgtcggcagaatgcttaatgaattacaacagtactgcgatgagtggcagggcggggcgtaatttttttaaggcagttattggtgcccttctagagtccttactgcagtagttttgctgaaatactcgattcacaaaaatatcaacttatggttgttttgtgagatatcaatatatggttgttttgtggttaagttgctgattataaataattattaaatatcactttatggttgcatcaacaggtaccgagctcgaattcactggccgtcgttttacaacgtcgtgactgggaaaaccctggcgttacccaacttaatcgccttgcggccagtttgctcaggctctccccgtggaggtaataattgacgatatgatcatttattctgcctcccagagcctgataaaaacggtgaatccgttagcgaggtgccgccggcttccattcaggtcgaggtggcccggctccatgcaccgcgacgcaacgcggggaggcagacaaggtatagggcggcgaggcggctacagccgatagtctggaacagcgcacttacgggttgctgcgcaacccaagtgctaccggcgcggcagcgtgacccgtgtcggcggctccaacggctcgccatcgtccagaaaacacggctcatcgggcatcggcaggcgctgctgcccgcgccgttcccattcctccgtttcggtcaaggctggcaggtctggttccatgcccggaatgccgggctggctgggcggctcctcgccggggccggtcggtagttgctgctcgcccggatacagggtcgggatgcggcgcaggtcgccatgccccaacagcgattcgtcctggtcgtcgtgatcaaccaccacggcggcactgaacaccgacaggcgcaactggtcgcggggctggccccacgccacgcggtcattgaccacgtaggccgacacggtgccggggccgttgagcttcacgacggagatccagcgctcggccaccaagtccttgactgcgtattggaccgtccgcaaagaacgtccgatgagcttggaaagtgtcttctggctgaccaccacggcgttctggtggcccatctgcgccacgaggtgatgcagcagcattg

SEQ ID NO: 1760 - DNA, 14028 bp, Synthetic construct
  source 1..14028: mol_type = other DNA
ccgccgtgggtttcctcgcaataagcccggcccacgcctcatgcgctttgcgttccgtttgcacccagtgaccgggcttgttcttggcttgaatgccgatttctctggactgcgtggccatgcttatctccatgcggtaggggtgccgcacggttgcggcaccatgcgcaatcagctgcaacttttcggcagcgcgacaacaattatgcgttgcgtaaaagtggcagtcaattacagattttctttaacctacgcaatgagctattgcggggggtgccgcaatgagctgttgcgtaccccccttttttaagttgttgatttttaagtctttcgcatttcgccctatatctagttctttggtgcccaaagaagggcacccctgcggggttcccccacgccttcggcgcggctccccctccggcaaaaagtggcccctccggggcttgttgatcgactgcgcggccttcggccttgcccaaggtggcgctgcccccttggaacccccgcactcgccgccgtgaggctcggggggcaggcgggcgggcttcgcccttcgactgcccccactcgcataggcttgggtcgttccaggcgcgtcaaggccaagccgctgcgcggtcgctgcgcgagccttgacccgccttccacttggtgtccaaccggcaagcgaagcgcgcaggccgcaggccggaggcttttccccagagaaaattaaaaaaattgatggggcaaggccgcaggccgcgcagttggagccggtgggtatgtggtcgaaggctgggtagccggtgggcaatccctgtggtcaagctcgtgggcaggcgcagcctgtccatcagcttgtccagcagggttgtccacgggccgagcgaagcgagccagccggtggccgctcgcggccatcgtccacatatccacgggctggcaagggagcgcagcgaccgcgcagggcgaagcccggagagcaagcccgtagggcgccgcagccgccgtaggcggtcacgactttgcgaagcaaagtctagtgagtatactcaagcattgagtggcccgccggaggcaccgccttgcgctgcccccgtcgagccggttggacaccaaaagggaggggcaggcatggcggcatacgcgatcatgcgatgcaagaagctggcgaaaatgggcaacgtggcggccagtctcaagcacgcctaccgcgagcgcgagacgcccaacgctgacgccagcaggacgccagagaacgagcactgggcggccagcagcaccgatgaagcgatgggccgactgcgcgagttgctgccagagaagcggcgcaaggacgctgtgttggcggtcgagtacgtcatgacggccagcccggaatggtggaagtcggccagccaagaacagcaggcggcgttcttcgagaaggcgcacaagtggctggcggacaagtacggggcggatcgcatcgtgacggccagcatccaccgtgacgaaaccagcccgcacatgaccgcgttcgtggtgccgctgacgcaggacggcaggctgtcggccaaggagttcatcggcaacaaagcgcagatgacccgcgaccagaccacgtttgcggccgctgtggccgatctagggctgcaacggggcatcgagggcagcaaggcacgtcacacgcgcattcaggcgttctacgaggccctggagcggccaccagtgggccacgtcaccatcagcccgcaagcggtcgagccacgcgcctatgcaccgcagggattggccgaaaagctgggaatctcaaagcgcgttgagacgccggaagccgtggccgaccggctgacaaaagcggttcggcaggggtatgagcctgccctacaggccgccgcaggagcgcgtgagatgcgcaagaaggccgatcaagcccaagagacggcccgtgaccttcgggagcgcctgaagcccgttctggacgccctggggccgttgaatcgggatatgcaggccaaggccgccgcgatcatcaaggccgtgggcgaaaagctgctgacggaacagcgggaagtccagcgccagaaacaggcccagcgccagcaggaacgcgggcgcgcacatttccccgaaaagtgccacctgggatgaatgtcagctactgggctatctggacaagggaaaacgcaagcgcaaagagaaagcaggtagcttgcagtgggcttacatggcgatagctagactgggcggttttatggacagcaagcgaaccggaattgccagctggggcgccctctggtaaggttgggaagccctgcaaagtaaactggatggctttcttgccgccaaggatctgatggcgcaggggatcaagatctgatcaagagacaggatgaggatcgtttcgcatgattgaacaagatggattgcacgcaggttctccggccgcttgggtggagaggctattcggctatgactgggcacaacagacaatcggctgctctgatgccgccgtgttccggctgtcagcgcaggggcgcccggttctttttgtcaagaccgacctgtccggtgccctgaatgaactgcaagacgaggcagcgcggctatcgtggctggccacgacgggcgttccttgcgcagctgtgctcgacgttgtcactgaagcgggaagggactggctgctattgggcgaagtgccggggcaggatctcctgtcatctcaccttgctcctgccgagaaagtatccatcatggctgatgcaatgcggcggctgcatacgcttgatccggctacctgcccattcgaccaccaagcgaaacatcgcatcgagcgagcacgtactcggatggaagccggtcttgtcgatcaggatgatctggacgaagagcatcaggggctcgcgccagccgaactgttcgccaggctcaaggcgcgcatgcccgacggcgaggatctcgtcgtgacccatggcgatgcctgcttgccgaatatcatggtggaaaatggccgcttttctggattcatcgactgtggccggctgggtgtggcggaccgctatcaggacatagcgttggctacccgtgatattgctgaagagcttggcggcgaatgggctgaccgcttcctcgtgctttacggtatcgccgctcccgattcgcagcgcatcgccttctatcgccttcttgacgagttcttctgagcgggactctggggttcgaaatgaccgaccaagcgacgcccaacctgccatcacgagatttcgattccaccgccgccttctatgaaaggttgggcttcggaatcgttttccgggacgccggctggatgatcctccagcgcggggatctcatgctggagttcttcgcccacccccatgggcaaatattatacgcaaggcgacaaggtgctgatgccgctggcgattcaggttcatcatgccgtttgtgatggcttccatgtcggcagaatgcttaatgaattacaacagtttttatgcatgcgcccaatacgcaaaccgcctctccccgcgcgttggccgattcattaatgcagctggcacgacaggtttcccgactggtggataaccgtattaccgcctttgagtgagctgataccgctcgccgcagccgaacgaccgagcgcagcgagtcagtgagcgaggacacaagctttgacagctagctcagtcctaggtataatactagcgtcgacgtggagatataccatgggtgaactgccgagtaggtagctgataacggaagatactgttcgataaacgaacacacatggtgaactgccgagtaggtagctgataacggatccgaattcgagcgaaggagatatacatatgtttttgcaaagacctaaaccttacagcgatgaaagtttagaaagtttctttatccgagtggctaacaaaaatggctacggtgatgtccatcgcttcctagaagccactaaacgattccttcaagacattgaccataatggctatcaaacctttccgactgatataactcggataaacccatactcagctaaaaacagttccagcgcacgaactgcgtcattcctgaaacttgcacaattgacatttaatgaaccgccagagctacttgggttggcaattaacagaacaaacatgaaatactcgccgtcaactagcgcggttgttagaggtgcagaagtctttcctcgcagtttactacggacgcactccatcccctgctgtcctttgtgtctgcgagaaaatggctacgcctcctacctttggcactttcaggggtacgaatactgccacagccataacgtacctttaattaccacttgtagctgtggtaaggagtttgactaccgagtatctgggttaaagggcatttgctgcaaatgcaaggagcctatcaccttaaccagcagggagaacggtcatgaggcagcgtgtactgtttcaaactggcttgctggccatgaatctaaacctctgccaaatcttcctaaaagctaccgatggggtttagttcattggtggatgggtattaaagatagcgagttcgatcacttttcgttcgttcaatttttctcaaactggccaaggtcattccactcgataatcgaagatgaagtagagttcaaccttgagcatgctgttgtcagcacgtctgaattacgactaaaagatcttcttggtcgattgtttttcggttcaattcggttacctgagcggaatcttcaacacaatatcatccttggtgagcttctctgctatttagaaaatcgtttatggcaagacaagggattaatcgccaacctcaaaatgaacgcgttagaggcgactgtaatgttaaattgtagcctcgatcagattgcatcaatggttgaacaacgcatcttgaagccaaatcgaaaaagcaagcccaacagccctcttgatgttaccgattatctatttcatttcggcgatattttctgtctttggttagctgagttccaaagcgatgagtttaaccgttcgttttatgtgtcgaggtggtaaatgcaaactctgaaagaactaatcgcatccaatcctgacgacttaacaactgaacttaagagagcatttcgtccactcacaccgcatattgcaattgatggtaatgaacttgacgcactgacgatattagtcaatttaaccgataagactgatgatcagaaagacctgctcgatcgagccaaatgcaagcaaaaacttcgagatgaaaaatggtgggctagctgcataaattgcgttaattacagacaaagccataacccaaaattcccggatatacgttctgaaggcgtgattcgaacccaagccctgggtgaattaccgagtttcctactctcgtcctcaaaaatcccaccataccattggtcatatagccatgattcaaaatacgtcaacaaaagcgcattcctcaccaatgagttttgttgggatggtgagatctcatgtttgggtgagcttcttaaagatgcagatcacccactttggaatactttgaaaaagttaggttgttctcaaaaaacttgcaaagcaatggcaaaacaactagctgatattactctcacgactatcaatgtcacactcgcaccaaattacctgactcaaatatctctccccgatagtgatacatcctacatttcactctctcctgttgcatcgctatcgatgcaaagccactttcatcagaggctccaagatgaaaatcggcatagcgcgataacgcggtttagccgaactaccaacatgggggtcactgcgatgacatgtggcggcgcatttagaatgttaaagtctggcgctaagttttccagcccccctcatcaccgattaaacagtaaacgaagttggttgacgtcagagcatgttcagtcattaaaacagtaccagcgcctcaacaaaagcctcatacctgaaaactctcggattgcactccgtagaaaatacaaaatcgagcttcaaaatatggtcagatcttggtttgcaatgcaagaccatacccttgattcgaacatacttatccaacatttgaatcatgacctatcttacttaggagccacaaaacgttttgcatacgatccagcgatgaccaagctctttactgagcttttgaaacgagagttatcaaattcaatcaataatggtgagcaacacactaatggatcgtttttagtcctaccgaatatcagggtttgtggcgcaacagctttaagctccccggtaacggtggggattccatcacttacagctttctttggcttcgttcacgcatttgaacggaatataaatcgcaccacctcatcgtttcgtgttgaatcctttgcgatatgcgtccatcaactacatgtcgagaagcgaggtttgacagcagagtttgtggaaaaaggcgacgggactatatccgctcccgcgacccgggatgactggcagtgtgatgtcgtatttagccttattttgaacaccaactttgctcaacatattgaccaagatacgttagttacatcactaccaaagcgattggctcggggttcagcaaaaattgcgattgatgactttaaacatatcaactcattctcgacattagaaacagcgatcgaatctctgccaatagaagctggtaggtggttatcactttacgcacagtcaaacaataatctaagtgatctattagcagccatgacagaggaccatcagctcatggcaagctgcgtcggttaccacttgttagaagagcccaaagataaaccaaactccctcagaggttacaaacacgctatcgccgagtgcatcattggactcattaactcaatcacctttagctcagagactgatcccaacacaatcttttggtcgctaaagaactatcaaaactacctagtggtacagccaaggagtatcaacgatgaaactaccgacaaatctagcctatgagcgctctatcgacccatcagatgtctgtttttttgtcgtctggcccgatgatagaaaaacacctttaacctacaattctcgtactctgctcgggcaaatggaagcggcatcattagcctatgatgtctcaggtcaaccaataaaaagtgccaccgctgaggcgttagctcaagggaaccctcatcaagttgatttctgccacgttccatacggtgcgagtcatattgaatgcagtttctccgtctcgttttcttctgaactacgtcaaccatataagtgtaactcaagcaaagttaaacaaacgctagtgcaattagtcgagctctacgaaacgaaaatcggctggactgagctagcaacccgatatttgatgaacatttgcaacggtaaatggctgtggaaaaatacccgtaaagcctattgctggaacattgtacttacaccttggccttggaacggggaaaaggttggatttgaagatattcgtactaactacacctcacggcaagactttaaaaataataaaaattggtctgctatagttgaaatgatcaaaaccgcattttctagtactgatgggctggcgatatttgaagtcagggccaccttgcacttgccaacgaatgctatggtgcggccaagccaagttttcacagaaaaagaaagtggcagtaaaagtaaatctaaaactcaaaacagtcgagtttttcagagtacaactattgatggtgaacgatcgccaatactaggggcctttaaaacgggagcagctattgcaaccattgacgactggtatcctgaagccactgagccactaagggtcggacggtttggggttcatcgcgaagatgtcacttgctaccgtcatccgtctaccggaaaagattttttctcgatattacaacaagcagagcactatattgaagtgttgagcgccaacaaaactcccgctcaagaaactatcaacgacatgcactttttaatggctaacctgattaagggtgggatgttccagcataaaggagactgactgtgaaatggtattataagacaatcacctttctgccagagttgtgcaacaacgagtcactggctgcaaagtgtctccgcgttctgcatggatttaactatcagtatgagacacgaaatatcggcgtttcatttccgctttggtgtgatgcaacggttggaaaaaagatttcatttgtcagcaagaacaagatagaactcgacttactacttaaacaacactatttcgtccaaatggaacaacttcaatactttcatatatccaacactgttctcgtcccagaagattgtacatacgtttcctttagacgctgtcaatctatagataagctcacagcagcagggctggcaaggaaaatcagacgcctggagaaacgtgctctatctagaggcgagcaatttgacccatcatcttttgctcaaaaagagcatactgcaatagcgcactaccactcacttggggagtccagcaaacagacgaaccgcaactttcgactcaatatcaggatgctctcggagcaaccccgtgaggggaactcgatttttagtagctatggcttatcaaattcagaaaactcgtttcagcctgtacccttaatctgacctttaataaggagatataccatggcgacaagtttacctacgccctcagcaattacgacttcggcgttagagtatgcattccatactcccgctcgcaatctaacgaaatctcgcggaaaaaacattcatcgttatgtcagtgtaaagatgagtaagaggattacggtagaatctactctagagtgtgatgcctgctatcactttgattttgagccaagtattgttcgcttttgcgctcaaccgattcgatttttatattatctcaatggtcagtctcactcctatgttcctgactttctagttcaatttgataccaacgagtttgttctatatgaagtaaagtcagcttatgctaagaacaaacctgattttgatgttgaatgggaggcgaaagtaaaagcagcaactgaactagggctagaattggagcttgttgaagagagtgatattagggatacggttgtattaaataatcttaagcgcatgcatcgttatgcttcgaaagatgagctgaataacgtacataactctctcttaaaaataataaagtacaatggcgcccaatctgcaagatgcttgggagaacagttgggtttaaaaggccgaactgttttaccaattttgtgcgatttgctgtcaaggtgtttactcgatacacgtttggataagcctctatctcttgaatctcgatttgagttggccagttatggctaagaaagggttctcaagtttccatagaaaagcagtctcttcccaagatacgcttgaatcgatagagcttgtctctagcgctaattgtctagaaagtgttacgtatcaagatatatcagcatttcccgaaacaattgcggtagagattaatttccgattaagcattcttcgctttttagcgcgaaagtgcgaaaccattgtggccaaatcaattgaaccacatcgtgtagagctacagcaaaactatagtagaaaaatacccagtgcaataacgatatatcgatggtggcttgcttttcgaaaatcagactacaaccccattagcttagcacctaatatcaaggatagaggtaatagagagacaaaagtgtcaacagttgttgattctattatggaacaggcagttgaaagagttatatctggacgaaaagtcaatgttagctctgcatataaacgtgttcgacgaaaagttcgtcaatacaatctaactcatggaacgaaatacacgtatcctaagtacgaatctgtaagaaagcgagtaaaaaagaaaaccccatttgagttattagccgcagggaaaggggagagagtagctaagagagagtttcgccgaatgggaaaaaagatcctcacgtctagcgtgctagagagggttgaaatagatcacactgtcgttgacctttttgcagtacacgaagagtatcgaatcccattgggccgaccttggcttactcaattggttgattgttacagtaaagctgtaatcggtttttatttaggtttcgagcctcctagctatgtgtcggtttcccttgcacttaagaatgcaatacaacgcaaagatgacttaatctcctcgtatgaatcgatcgagaatgaatggctatgttatggcatcccagacctactcgtaactgataatggtaaagagtttttgtcgaaagcatttgatcaagcatgtgaatcactattgatcaatgtgcatcaaaataaagttgagacgcccgacaacaaacctcatgttgaacgtaactacgggactattaatacttctctgttagacgatttacctgggaaatccttcagccagtaccttcaaagagaagggtacgactctgtgggagaagctacccttacactcaatgagattagagaaatttacttaatttggttggtggatatttatcataaaaaacccaatcagagaggcactaattgtcctaatgttgcgtggaaaaagggttgtcaagaatgggaaccagaggagttctctggttctaaagacgaattagactttaaatttgctattgttgattacaaacaacttactaaagtagggataactgtctacaaagaactgagttatagcaatgaccgtttagctgaatatagagggaagaaaggaaaccataaagttcagttcaagtataaccctgagtgtatggcagttatttgggtgttggatgaggatatgaatgagtactttacagttaatgcgattgactacgaatatgcaagtagagtatcactttggcaacataaatataacatgaaatatcaagcagaactaaattcagcagaatatgatgaggacaaggaaattgatgcagaaataaaaattgaagaaatcgcagatcgttcaattgttaagactaacaaaatcagagctcggaggcgtggcgctaggcatcaagagaatagcgcaagggctaagtcaatcagtaatgcgaacccggcctcgatacaaaaacatgaagatgaaatcgttagtgcagataatgacgattgggatattgattatgtctgagaaatcgtcaaatgagtgaaacgcgtgaggctcgtatatcaagagctaaaagggcatttgtatccacaccgagcgttaggaaaatcttgagttacatggatagatgtagagatctatcagacctagagtctgagcctacatgcatgatggtctatggtgcttcgggtgtaggtaaaacgaccgtcatcaagaaatacttaaatcaaaacagaagagagtccgaagccgggggcgatataataccggttttgcatattgagttgccagacaatgcgaagccagtagatgcagcaagggaattgctggttgaaatgggtgacccgctagcactttatgaaactgacttagctagattgacgaaaagactgactgaattaatccctgcggtcggcgtgaagctgattattatcgatgagttccaacatttggtggaagaaaggtcaaatcgggttcttacccaagtaggtaattggctaaaaatgatacttaacaaaacgaaatgtccaattgttatatttggtatgccatactcaaaagttgtactgcaagcaaactcgcaacttcacgggcgattttccattcaggttgaactgcgcccctttagctaccagggaggtagaggtgtatttaaaacttttttggaataccttgataaagccctaccttttgaaaaacaggctggcttagccaacgaaagtttgcagaaaaaattgtatgcattctctcagggaaacatgcgttcgttgagaaaccttatttatcaagcatctatcgaagcaattgataatcagcatgagacgataaccgaagaagatttcgtttttgcatcgaagttgacatcgggcgataaacccaactcatggaaaaatccttttgaggagggtgttgaggtaacagaagatatgttacgaccgccaccaaaagatattggttgggaggactatttgagacattcaaccccgagagtgagtaaaccaggtagaaataaaaactttttcgaataacctaggctgctgcgctgctgccaccgctgagcaataactagcataaccccttggggcctctaaacgggtcttgaggggttttttgctgaaacctcaggcatgttggaacaaccataaaatgataattacacccataaattgataattatcacacccataaattgatattgcctcttcatggtctaaacttcagtaagtttacgacattttcatgaagaggtcatttccggggatccatggagaaaaaaatcactggatataccaccgttgatatatcccaatggcatcgtaaagaacattttgaggcatttcagtcagttgctcaatgtacctataaccagaccgttcagctggatattacggcctttttaaagaccgtaaagaaaaataagcacaagttttatccggcctttattcacattcttgcccgcctgatgaatgctcatccggagttccgtatggcaatgaaagacggtgagctggtgatatgggatagtgttcacccttgttacaccgttttccatgagcaaactgaaacgttttcatcgctctggagtgaataccacgacgatttccggcagtttctacacatatattcgcaagatgtggcgtgttacggtgaaaacctggcctatttccctaaagggtttattgagaatatgtttttcgtctcagccaatccctgggtgagtttcaccagttttgatttaaacgtggccaatatggacaacttcttcgcccccgttttcactatgggcaaatattatacgcaaggcgacaaggtgctgatgccgctggcgattcaggttcatcatgccgtttgtgatggcttccatgtcggcagaatgcttaatgaattacaacagtactgcgatgagtggcagggcggggcgtaatttttttaaggcagttattggtgcccttctagagtccttactgcagtagttttgctgaaatactcgattcacaaaaatatcaacttatggttgttttgtgagatatcaatatatggttgttttgtggttaagttgctgattataaataattattaaatatcactttatggttgcatcaacaggtaccgagctcgaattcactggccgtcgttttacaacgtcgtgactgggaaaaccctggcgttacccaacttaatcgccttgcggccagtttgctcaggctctccccgtggaggtaataattgacgatatgatcatttattctgcctcccagagcctgataaaaacggtgaatccgttagcgaggtgccgccggcttccattcaggtcgaggtggcccggctccatgcaccgcgacgcaacgcggggaggcagacaaggtatagggcggcgaggcggctacagccgatagtctggaacagcgcacttacgggttgctgcgcaacccaagtgctaccggcgcggcagcgtgacccgtgtcggcggctccaacggctcgccatcgtccagaaaacacggctcatcgggcatcggcaggcgctgctgcccgcgccgttcccattcctccgtttcggtcaaggctggcaggtctggttccatgcccggaatgccgggctggctgggcggctcctcgccggggccggtcggtagttgctgctcgcccggatacagggtcgggatgcggcgcaggtcgccatgccccaacagcgattcgtcctggtcgtcgtgatcaaccaccacggcggcactgaacaccgacaggcgcaactggtcgcggggctggccccacgccacgcggtcattgaccacgtaggccgacacggtgccggggccgttgagcttcacgacggagatccagcgctcggccaccaagtccttgactgcgtattggaccgtccgcaaagaacgtccgatgagcttggaaagtgtcttctggctgaccaccacggcgttctggtggcccatctgcgccacgaggtgatgcagcagcattg

SEQ ID NO: 1761 - DNA, 14028 bp, Synthetic construct
  source 1..14028: mol_type = other DNA
ccgccgtgggtttcctcgcaataagcccggcccacgcctcatgcgctttgcgttccgtttgcacccagtgaccgggcttgttcttggcttgaatgccgatttctctggactgcgtggccatgcttatctccatgcggtaggggtgccgcacggttgcggcaccatgcgcaatcagctgcaacttttcggcagcgcgacaacaattatgcgttgcgtaaaagtggcagtcaattacagattttctttaacctacgcaatgagctattgcggggggtgccgcaatgagctgttgcgtaccccccttttttaagttgttgatttttaagtctttcgcatttcgccctatatctagttctttggtgcccaaagaagggcacccctgcggggttcccccacgccttcggcgcggctccccctccggcaaaaagtggcccctccggggcttgttgatcgactgcgcggccttcggccttgcccaaggtggcgctgcccccttggaacccccgcactcgccgccgtgaggctcggggggcaggcgggcgggcttcgcccttcgactgcccccactcgcataggcttgggtcgttccaggcgcgtcaaggccaagccgctgcgcggtcgctgcgcgagccttgacccgccttccacttggtgtccaaccggcaagcgaagcgcgcaggccgcaggccggaggcttttccccagagaaaattaaaaaaattgatggggcaaggccgcaggccgcgcagttggagccggtgggtatgtggtcgaaggctgggtagccggtgggcaatccctgtggtcaagctcgtgggcaggcgcagcctgtccatcagcttgtccagcagggttgtccacgggccgagcgaagcgagccagccggtggccgctcgcggccatcgtccacatatccacgggctggcaagggagcgcagcgaccgcgcagggcgaagcccggagagcaagcccgtagggcgccgcagccgccgtaggcggtcacgactttgcgaagcaaagtctagtgagtatactcaagcattgagtggcccgccggaggcaccgccttgcgctgcccccgtcgagccggttggacaccaaaagggaggggcaggcatggcggcatacgcgatcatgcgatgcaagaagctggcgaaaatgggcaacgtggcggccagtctcaagcacgcctaccgcgagcgcgagacgcccaacgctgacgccagcaggacgccagagaacgagcactgggcggccagcagcaccgatgaagcgatgggccgactgcgcgagttgctgccagagaagcggcgcaaggacgctgtgttggcggtcgagtacgtcatgacggccagcccggaatggtggaagtcggccagccaagaacagcaggcggcgttcttcgagaaggcgcacaagtggctggcggacaagtacggggcggatcgcatcgtgacggccagcatccaccgtgacgaaaccagcccgcacatgaccgcgttcgtggtgccgctgacgcaggacggcaggctgtcggccaaggagttcatcggcaacaaagcgcagatgacccgcgaccagaccacgtttgcggccgctgtggccgatctagggctgcaacggggcatcgagggcagcaaggcacgtcacacgcgcattcaggcgttctacgaggccctggagcggccaccagtgggccacgtcaccatcagcccgcaagcggtcgagccacgcgcctatgcaccgcagggattggccgaaaagctgggaatctcaaagcgcgttgagacgccggaagccgtggccgaccggctgacaaaagcggttcggcaggggtatgagcctgccctacaggccgccgcaggagcgcgtgagatgcgcaagaaggccgatcaagcccaagagacggcccgtgaccttcgggagcgcctgaagcccgttctggacgccctggggccgttgaatcgggatatgcaggccaaggccgccgcgatcatcaaggccgtgggcgaaaagctgctgacggaacagcgggaagtccagcgccagaaacaggcccagcgccagcaggaacgcgggcgcgcacatttccccgaaaagtgccacctgggatgaatgtcagctactgggctatctggacaagggaaaacgcaagcgcaaagagaaagcaggtagcttgcagtgggcttacatggcgatagctagactgggcggttttatggacagcaagcgaaccggaattgccagctggggcgccctctggtaaggttgggaagccctgcaaagtaaactggatggctttcttgccgccaaggatctgatggcgcaggggatcaagatctgatcaagagacaggatgaggatcgtttcgcatgattgaacaagatggattgcacgcaggttctccggccgcttgggtggagaggctattcggctatgactgggcacaacagacaatcggctgctctgatgccgccgtgttccggctgtcagcgcaggggcgcccggttctttttgtcaagaccgacctgtccggtgccctgaatgaactgcaagacgaggcagcgcggctatcgtggctggccacgacgggcgttccttgcgcagctgtgctcgacgttgtcactgaagcgggaagggactggctgctattgggcgaagtgccggggcaggatctcctgtcatctcaccttgctcctgccgagaaagtatccatcatggctgatgcaatgcggcggctgcatacgcttgatccggctacctgcccattcgaccaccaagcgaaacatcgcatcgagcgagcacgtactcggatggaagccggtcttgtcgatcaggatgatctggacgaagagcatcaggggctcgcgccagccgaactgttcgccaggctcaaggcgcgcatgcccgacggcgaggatctcgtcgtgacccatggcgatgcctgcttgccgaatatcatggtggaaaatggccgcttttctggattcatcgactgtggccggctgggtgtggcggaccgctatcaggacatagcgttggctacccgtgatattgctgaagagcttggcggcgaatgggctgaccgcttcctcgtgctttacggtatcgccgctcccgattcgcagcgcatcgccttctatcgccttcttgacgagttcttctgagcgggactctggggttcgaaatgaccgaccaagcgacgcccaacctgccatcacgagatttcgattccaccgccgccttctatgaaaggttgggcttcggaatcgttttccgggacgccggctggatgatcctccagcgcggggatctcatgctggagttcttcgcccacccccatgggcaaatattatacgcaaggcgacaaggtgctgatgccgctggcgattcaggttcatcatgccgtttgtgatggcttccatgtcggcagaatgcttaatgaattacaacagtttttatgcatgcgcccaatacgcaaaccgcctctccccgcgcgttggccgattcattaatgcagctggcacgacaggtttcccgactggtggataaccgtattaccgcctttgagtgagctgataccgctcgccgcagccgaacgaccgagcgcagcgagtcagtgagcgaggacacaagctttgacagctagctcagtcctaggtataatactagcgtcgacgtggagatataccatgggtgaactgccgagtaggtagctgataaccattcaccgttgcaccacagatgaaaagctgagtgaactgccgagtaggtagctgataacggatccgaattcgagcgaaggagatatacatatgtttttgcaaagacctaaaccttacagcgatgaaagtttagaaagtttctttatccgagtggctaacaaaaatggctacggtgatgtccatcgcttcctagaagccactaaacgattccttcaagacattgaccataatggctatcaaacctttccgactgatataactcggataaacccatactcagctaaaaacagttccagcgcacgaactgcgtcattcctgaaacttgcacaattgacatttaatgaaccgccagagctacttgggttggcaattaacagaacaaacatgaaatactcgccgtcaactagcgcggttgttagaggtgcagaagtctttcctcgcagtttactacggacgcactccatcccctgctgtcctttgtgtctgcgagaaaatggctacgcctcctacctttggcactttcaggggtacgaatactgccacagccataacgtacctttaattaccacttgtagctgtggtaaggagtttgactaccgagtatctgggttaaagggcatttgctgcaaatgcaaggagcctatcaccttaaccagcagggagaacggtcatgaggcagcgtgtactgtttcaaactggcttgctggccatgaatctaaacctctgccaaatcttcctaaaagctaccgatggggtttagttcattggtggatgggtattaaagatagcgagttcgatcacttttcgttcgttcaatttttctcaaactggccaaggtcattccactcgataatcgaagatgaagtagagttcaaccttgagcatgctgttgtcagcacgtctgaattacgactaaaagatcttcttggtcgattgtttttcggttcaattcggttacctgagcggaatcttcaacacaatatcatccttggtgagcttctctgctatttagaaaatcgtttatggcaagacaagggattaatcgccaacctcaaaatgaacgcgttagaggcgactgtaatgttaaattgtagcctcgatcagattgcatcaatggttgaacaacgcatcttgaagccaaatcgaaaaagcaagcccaacagccctcttgatgttaccgattatctatttcatttcggcgatattttctgtctttggttagctgagttccaaagcgatgagtttaaccgttcgttttatgtgtcgaggtggtaaatgcaaactctgaaagaactaatcgcatccaatcctgacgacttaacaactgaacttaagagagcatttcgtccactcacaccgcatattgcaattgatggtaatgaacttgacgcactgacgatattagtcaatttaaccgataagactgatgatcagaaagacctgctcgatcgagccaaatgcaagcaaaaacttcgagatgaaaaatggtgggctagctgcataaattgcgttaattacagacaaagccataacccaaaattcccggatatacgttctgaaggcgtgattcgaacccaagccctgggtgaattaccgagtttcctactctcgtcctcaaaaatcccaccataccattggtcatatagccatgattcaaaatacgtcaacaaaagcgcattcctcaccaatgagttttgttgggatggtgagatctcatgtttgggtgagcttcttaaagatgcagatcacccactttggaatactttgaaaaagttaggttgttctcaaaaaacttgcaaagcaatggcaaaacaactagctgatattactctcacgactatcaatgtcacactcgcaccaaattacctgactcaaatatctctccccgatagtgatacatcctacatttcactctctcctgttgcatcgctatcgatgcaaagccactttcatcagaggctccaagatgaaaatcggcatagcgcgataacgcggtttagccgaactaccaacatgggggtcactgcgatgacatgtggcggcgcatttagaatgttaaagtctggcgctaagttttccagcccccctcatcaccgattaaacagtaaacgaagttggttgacgtcagagcatgttcagtcattaaaacagtaccagcgcctcaacaaaagcctcatacctgaaaactctcggattgcactccgtagaaaatacaaaatcgagcttcaaaatatggtcagatcttggtttgcaatgcaagaccatacccttgattcgaacatacttatccaacatttgaatcatgacctatcttacttaggagccacaaaacgttttgcatacgatccagcgatgaccaagctctttactgagcttttgaaacgagagttatcaaattcaatcaataatggtgagcaacacactaatggatcgtttttagtcctaccgaatatcagggtttgtggcgcaacagctttaagctccccggtaacggtggggattccatcacttacagctttctttggcttcgttcacgcatttgaacggaatataaatcgcaccacctcatcgtttcgtgttgaatcctttgcgatatgcgtccatcaactacatgtcgagaagcgaggtttgacagcagagtttgtggaaaaaggcgacgggactatatccgctcccgcgacccgggatgactggcagtgtgatgtcgtatttagccttattttgaacaccaactttgctcaacatattgaccaagatacgttagttacatcactaccaaagcgattggctcggggttcagcaaaaattgcgattgatgactttaaacatatcaactcattctcgacattagaaacagcgatcgaatctctgccaatagaagctggtaggtggttatcactttacgcacagtcaaacaataatctaagtgatctattagcagccatgacagaggaccatcagctcatggcaagctgcgtcggttaccacttgttagaagagcccaaagataaaccaaactccctcagaggttacaaacacgctatcgccgagtgcatcattggactcattaactcaatcacctttagctcagagactgatcccaacacaatcttttggtcgctaaagaactatcaaaactacctagtggtacagccaaggagtatcaacgatgaaactaccgacaaatctagcctatgagcgctctatcgacccatcagatgtctgtttttttgtcgtctggcccgatgatagaaaaacacctttaacctacaattctcgtactctgctcgggcaaatggaagcggcatcattagcctatgatgtctcaggtcaaccaataaaaagtgccaccgctgaggcgttagctcaagggaaccctcatcaagttgatttctgccacgttccatacggtgcgagtcatattgaatgcagtttctccgtctcgttttcttctgaactacgtcaaccatataagtgtaactcaagcaaagttaaacaaacgctagtgcaattagtcgagctctacgaaacgaaaatcggctggactgagctagcaacccgatatttgatgaacatttgcaacggtaaatggctgtggaaaaatacccgtaaagcctattgctggaacattgtacttacaccttggccttggaacggggaaaaggttggatttgaagatattcgtactaactacacctcacggcaagactttaaaaataataaaaattggtctgctatagttgaaatgatcaaaaccgcattttctagtactgatgggctggcgatatttgaagtcagggccaccttgcacttgccaacgaatgctatggtgcggccaagccaagttttcacagaaaaagaaagtggcagtaaaagtaaatctaaaactcaaaacagtcgagtttttcagagtacaactattgatggtgaacgatcgccaatactaggggcctttaaaacgggagcagctattgcaaccattgacgactggtatcctgaagccactgagccactaagggtcggacggtttggggttcatcgcgaagatgtcacttgctaccgtcatccgtctaccggaaaagattttttctcgatattacaacaagcagagcactatattgaagtgttgagcgccaacaaaactcccgctcaagaaactatcaacgacatgcactttttaatggctaacctgattaagggtgggatgttccagcataaaggagactgactgtgaaatggtattataagacaatcacctttctgccagagttgtgcaacaacgagtcactggctgcaaagtgtctccgcgttctgcatggatttaactatcagtatgagacacgaaatatcggcgtttcatttccgctttggtgtgatgcaacggttggaaaaaagatttcatttgtcagcaagaacaagatagaactcgacttactacttaaacaacactatttcgtccaaatggaacaacttcaatactttcatatatccaacactgttctcgtcccagaagattgtacatacgtttcctttagacgctgtcaatctatagataagctcacagcagcagggctggcaaggaaaatcagacgcctggagaaacgtgctctatctagaggcgagcaatttgacccatcatcttttgctcaaaaagagcatactgcaatagcgcactaccactcacttggggagtccagcaaacagacgaaccgcaactttcgactcaatatcaggatgctctcggagcaaccccgtgaggggaactcgatttttagtagctatggcttatcaaattcagaaaactcgtttcagcctgtacccttaatctgacctttaataaggagatataccatggcgacaagtttacctacgccctcagcaattacgacttcggcgttagagtatgcattccatactcccgctcgcaatctaacgaaatctcgcggaaaaaacattcatcgttatgtcagtgtaaagatgagtaagaggattacggtagaatctactctagagtgtgatgcctgctatcactttgattttgagccaagtattgttcgcttttgcgctcaaccgattcgatttttatattatctcaatggtcagtctcactcctatgttcctgactttctagttcaatttgataccaacgagtttgttctatatgaagtaaagtcagcttatgctaagaacaaacctgattttgatgttgaatgggaggcgaaagtaaaagcagcaactgaactagggctagaattggagcttgttgaagagagtgatattagggatacggttgtattaaataatcttaagcgcatgcatcgttatgcttcgaaagatgagctgaataacgtacataactctctcttaaaaataataaagtacaatggcgcccaatctgcaagatgcttgggagaacagttgggtttaaaaggccgaactgttttaccaattttgtgcgatttgctgtcaaggtgtttactcgatacacgtttggataagcctctatctcttgaatctcgatttgagttggccagttatggctaagaaagggttctcaagtttccatagaaaagcagtctcttcccaagatacgcttgaatcgatagagcttgtctctagcgctaattgtctagaaagtgttacgtatcaagatatatcagcatttcccgaaacaattgcggtagagattaatttccgattaagcattcttcgctttttagcgcgaaagtgcgaaaccattgtggccaaatcaattgaaccacatcgtgtagagctacagcaaaactatagtagaaaaatacccagtgcaataacgatatatcgatggtggcttgcttttcgaaaatcagactacaaccccattagcttagcacctaatatcaaggatagaggtaatagagagacaaaagtgtcaacagttgttgattctattatggaacaggcagttgaaagagttatatctggacgaaaagtcaatgttagctctgcatataaacgtgttcgacgaaaagttcgtcaatacaatctaactcatggaacgaaatacacgtatcctaagtacgaatctgtaagaaagcgagtaaaaaagaaaaccccatttgagttattagccgcagggaaaggggagagagtagctaagagagagtttcgccgaatgggaaaaaagatcctcacgtctagcgtgctagagagggttgaaatagatcacactgtcgttgacctttttgcagtacacgaagagtatcgaatcccattgggccgaccttggcttactcaattggttgattgttacagtaaagctgtaatcggtttttatttaggtttcgagcctcctagctatgtgtcggtttcccttgcacttaagaatgcaatacaacgcaaagatgacttaatctcctcgtatgaatcgatcgagaatgaatggctatgttatggcatcccagacctactcgtaactgataatggtaaagagtttttgtcgaaagcatttgatcaagcatgtgaatcactattgatcaatgtgcatcaaaataaagttgagacgcccgacaacaaacctcatgttgaacgtaactacgggactattaatacttctctgttagacgatttacctgggaaatccttcagccagtaccttcaaagagaagggtacgactctgtgggagaagctacccttacactcaatgagattagagaaatttacttaatttggttggtggatatttatcataaaaaacccaatcagagaggcactaattgtcctaatgttgcgtggaaaaagggttgtcaagaatgggaaccagaggagttctctggttctaaagacgaattagactttaaatttgctattgttgattacaaacaacttactaaagtagggataactgtctacaaagaactgagttatagcaatgaccgtttagctgaatatagagggaagaaaggaaaccataaagttcagttcaagtataaccctgagtgtatggcagttatttgggtgttggatgaggatatgaatgagtactttacagttaatgcgattgactacgaatatgcaagtagagtatcactttggcaacataaatataacatgaaatatcaagcagaactaaattcagcagaatatgatgaggacaaggaaattgatgcagaaataaaaattgaagaaatcgcagatcgttcaattgttaagactaacaaaatcagagctcggaggcgtggcgctaggcatcaagagaatagcgcaagggctaagtcaatcagtaatgcgaacccggcctcgatacaaaaacatgaagatgaaatcgttagtgcagataatgacgattgggatattgattatgtctgagaaatcgtcaaatgagtgaaacgcgtgaggctcgtatatcaagagctaaaagggcatttgtatccacaccgagcgttaggaaaatcttgagttacatggatagatgtagagatctatcagacctagagtctgagcctacatgcatgatggtctatggtgcttcgggtgtaggtaaaacgaccgtcatcaagaaatacttaaatcaaaacagaagagagtccgaagccgggggcgatataataccggttttgcatattgagttgccagacaatgcgaagccagtagatgcagcaagggaattgctggttgaaatgggtgacccgctagcactttatgaaactgacttagctagattgacgaaaagactgactgaattaatccctgcggtcggcgtgaagctgattattatcgatgagttccaacatttggtggaagaaaggtcaaatcgggttcttacccaagtaggtaattggctaaaaatgatacttaacaaaacgaaatgtccaattgttatatttggtatgccatactcaaaagttgtactgcaagcaaactcgcaacttcacgggcgattttccattcaggttgaactgcgcccctttagctaccagggaggtagaggtgtatttaaaacttttttggaataccttgataaagccctaccttttgaaaaacaggctggcttagccaacgaaagtttgcagaaaaaattgtatgcattctctcagggaaacatgcgttcgttgagaaaccttatttatcaagcatctatcgaagcaattgataatcagcatgagacgataaccgaagaagatttcgtttttgcatcgaagttgacatcgggcgataaacccaactcatggaaaaatccttttgaggagggtgttgaggtaacagaagatatgttacgaccgccaccaaaagatattggttgggaggactatttgagacattcaaccccgagagtgagtaaaccaggtagaaataaaaactttttcgaataacctaggctgctgcgctgctgccaccgctgagcaataactagcataaccccttggggcctctaaacgggtcttgaggggttttttgctgaaacctcaggcatgttggaacaaccataaaatgataattacacccataaattgataattatcacacccataaattgatattgcctcttcatggtctaaacttcagtaagtttacgacattttcatgaagaggtcatttccggggatccatggagaaaaaaatcactggatataccaccgttgatatatcccaatggcatcgtaaagaacattttgaggcatttcagtcagttgctcaatgtacctataaccagaccgttcagctggatattacggcctttttaaagaccgtaaagaaaaataagcacaagttttatccggcctttattcacattcttgcccgcctgatgaatgctcatccggagttccgtatggcaatgaaagacggtgagctggtgatatgggatagtgttcacccttgttacaccgttttccatgagcaaactgaaacgttttcatcgctctggagtgaataccacgacgatttccggcagtttctacacatatattcgcaagatgtggcgtgttacggtgaaaacctggcctatttccctaaagggtttattgagaatatgtttttcgtctcagccaatccctgggtgagtttcaccagttttgatttaaacgtggccaatatggacaacttcttcgcccccgttttcactatgggcaaatattatacgcaaggcgacaaggtgctgatgccgctggcgattcaggttcatcatgccgtttgtgatggcttccatgtcggcagaatgcttaatgaattacaacagtactgcgatgagtggcagggcggggcgtaatttttttaaggcagttattggtgcccttctagagtccttactgcagtagttttgctgaaatactcgattcacaaaaatatcaacttatggttgttttgtgagatatcaatatatggttgttttgtggttaagttgctgattataaataattattaaatatcactttatggttgcatcaacaggtaccgagctcgaattcactggccgtcgttttacaacgtcgtgactgggaaaaccctggcgttacccaacttaatcgccttgcggccagtttgctcaggctctccccgtggaggtaataattgacgatatgatcatttattctgcctcccagagcctgataaaaacggtgaatccgttagcgaggtgccgccggcttccattcaggtcgaggtggcccggctccatgcaccgcgacgcaacgcggggaggcagacaaggtatagggcggcgaggcggctacagccgatagtctggaacagcgcacttacgggttgctgcgcaacccaagtgctaccggcgcggcagcgtgacccgtgtcggcggctccaacggctcgccatcgtccagaaaacacggctcatcgggcatcggcaggcgctgctgcccgcgccgttcccattcctccgtttcggtcaaggctggcaggtctggttccatgcccggaatgccgggctggctgggcggctcctcgccggggccggtcggtagttgctgctcgcccggatacagggtcgggatgcggcgcaggtcgccatgccccaacagcgattcgtcctggtcgtcgtgatcaaccaccacggcggcactgaacaccgacaggcgcaactggtcgcggggctggccccacgccacgcggtcattgaccacgtaggccgacacggtgccggggccgttgagcttcacgacggagatccagcgctcggccaccaagtccttgactgcgtattggaccgtccgcaaagaacgtccgatgagcttggaaagtgtcttctggctgaccaccacggcgttctggtggcccatctgcgccacgaggtgatgcagcagcattg

SEQ ID NO: 1762 - DNA, 14035 bp, Synthetic construct
  source 1..14035: mol_type = other DNA
ccgccgtgggtttcctcgcaataagcccggcccacgcctcatgcgctttgcgttccgtttgcacccagtgaccgggcttgttcttggcttgaatgccgatttctctggactgcgtggccatgcttatctccatgcggtaggggtgccgcacggttgcggcaccatgcgcaatcagctgcaacttttcggcagcgcgacaacaattatgcgttgcgtaaaagtggcagtcaattacagattttctttaacctacgcaatgagctattgcggggggtgccgcaatgagctgttgcgtaccccccttttttaagttgttgatttttaagtctttcgcatttcgccctatatctagttctttggtgcccaaagaagggcacccctgcggggttcccccacgccttcggcgcggctccccctccggcaaaaagtggcccctccggggcttgttgatcgactgcgcggccttcggccttgcccaaggtggcgctgcccccttggaacccccgcactcgccgccgtgaggctcggggggcaggcgggcgggcttcgcccttcgactgcccccactcgcataggcttgggtcgttccaggcgcgtcaaggccaagccgctgcgcggtcgctgcgcgagccttgacccgccttccacttggtgtccaaccggcaagcgaagcgcgcaggccgcaggccggaggcttttccccagagaaaattaaaaaaattgatggggcaaggccgcaggccgcgcagttggagccggtgggtatgtggtcgaaggctgggtagccggtgggcaatccctgtggtcaagctcgtgggcaggcgcagcctgtccatcagcttgtccagcagggttgtccacgggccgagcgaagcgagccagccggtggccgctcgcggccatcgtccacatatccacgggctggcaagggagcgcagcgaccgcgcagggcgaagcccggagagcaagcccgtagggcgccgcagccgccgtaggcggtcacgactttgcgaagcaaagtctagtgagtatactcaagcattgagtggcccgccggaggcaccgccttgcgctgcccccgtcgagccggttggacaccaaaagggaggggcaggcatggcggcatacgcgatcatgcgatgcaagaagctggcgaaaatgggcaacgtggcggccagtctcaagcacgcctaccgcgagcgcgagacgcccaacgctgacgccagcaggacgccagagaacgagcactgggcggccagcagcaccgatgaagcgatgggccgactgcgcgagttgctgccagagaagcggcgcaaggacgctgtgttggcggtcgagtacgtcatgacggccagcccggaatggtggaagtcggccagccaagaacagcaggcggcgttcttcgagaaggcgcacaagtggctggcggacaagtacggggcggatcgcatcgtgacggccagcatccaccgtgacgaaaccagcccgcacatgaccgcgttcgtggtgccgctgacgcaggacggcaggctgtcggccaaggagttcatcggcaacaaagcgcagatgacccgcgaccagaccacgtttgcggccgctgtggccgatctagggctgcaacggggcatcgagggcagcaaggcacgtcacacgcgcattcaggcgttctacgaggccctggagcggccaccagtgggccacgtcaccatcagcccgcaagcggtcgagccacgcgcctatgcaccgcagggattggccgaaaagctgggaatctcaaagcgcgttgagacgccggaagccgtggccgaccggctgacaaaagcggttcggcaggggtatgagcctgccctacaggccgccgcaggagcgcgtgagatgcgcaagaaggccgatcaagcccaagagacggcccgtgaccttcgggagcgcctgaagcccgttctggacgccctggggccgttgaatcgggatatgcaggccaaggccgccgcgatcatcaaggccgtgggcgaaaagctgctgacggaacagcgggaagtccagcgccagaaacaggcccagcgccagcaggaacgcgggcgcgcacatttccccgaaaagtgccacctgggatgaatgtcagctactgggctatctggacaagggaaaacgcaagcgcaaagagaaagcaggtagcttgcagtgggcttacatggcgatagctagactgggcggttttatggacagcaagcgaaccggaattgccagctggggcgccctctggtaaggttgggaagccctgcaaagtaaactggatggctttcttgccgccaaggatctgatggcgcaggggatcaagatctgatcaagagacaggatgaggatcgtttcgcatgattgaacaagatggattgcacgcaggttctccggccgcttgggtggagaggctattcggctatgactgggcacaacagacaatcggctgctctgatgccgccgtgttccggctgtcagcgcaggggcgcccggttctttttgtcaagaccgacctgtccggtgccctgaatgaactgcaagacgaggcagcgcggctatcgtggctggccacgacgggcgttccttgcgcagctgtgctcgacgttgtcactgaagcgggaagggactggctgctattgggcgaagtgccggggcaggatctcctgtcatctcaccttgctcctgccgagaaagtatccatcatggctgatgcaatgcggcggctgcatacgcttgatccggctacctgcccattcgaccaccaagcgaaacatcgcatcgagcgagcacgtactcggatggaagccggtcttgtcgatcaggatgatctggacgaagagcatcaggggctcgcgccagccgaactgttcgccaggctcaaggcgcgcatgcccgacggcgaggatctcgtcgtgacccatggcgatgcctgcttgccgaatatcatggtggaaaatggccgcttttctggattcatcgactgtggccggctgggtgtggcggaccgctatcaggacatagcgttggctacccgtgatattgctgaagagcttggcggcgaatgggctgaccgcttcctcgtgctttacggtatcgccgctcccgattcgcagcgcatcgccttctatcgccttcttgacgagttcttctgagcgggactctggggttcgaaatgaccgaccaagcgacgcccaacctgccatcacgagatttcgattccaccgccgccttctatgaaaggttgggcttcggaatcgttttccgggacgccggctggatgatcctccagcgcggggatctcatgctggagttcttcgcccacccccatgggcaaatattatacgcaaggcgacaaggtgctgatgccgctggcgattcaggttcatcatgccgtttgtgatggcttccatgtcggcagaatgcttaatgaattacaacagtttttatgcatgcgcccaatacgcaaaccgcctctccccgcgcgttggccgattcattaatgcagctggcacgacaggtttcccgactggtggataaccgtattaccgcctttgagtgagctgataccgctcgccgcagccgaacgaccgagcgcagcgagtcagtgagcgaggacacaagctttgacagctagctcagtcctaggtataatactagcgtcgacaggatccgaattcgagctcggtataaggagatataccatggcgacaagtttacctacgccctcagcaattacgacttcggcgttagagtatgcattccatactcccgctcgcaatctaacgaaatctcgcggaaaaaacattcatcgttatgtcagtgtaaagatgagtaagaggattacggtagaatctactctagagtgtgatgcctgctatcactttgattttgagccaagtattgttcgcttttgcgctcaaccgattcgatttttatattatctcaatggtcagtctcactcctatgttcctgactttctagttcaatttgataccaacgagtttgttctatatgaagtaaagtcagcttatgctaagaacaaacctgattttgatgttgaatgggaggcgaaagtaaaagcagcaactgaactagggctagaattggagcttgttgaagagagtgatattagggatacggttgtattaaataatcttaagcgcatgcatcgttatgcttcgaaagatgagctgaataacgtacataactctctcttaaaaataataaagtacaatggcgcccaatctgcaagatgcttgggagaacagttgggtttaaaaggccgaactgttttaccaattttgtgcgatttgctgtcaaggtgtttactcgatacacgtttggataagcctctatctcttgaatctcgatttgagttggccagttatggctaagaaagggttctcaagtttccatagaaaagcagtctcttcccaagatacgcttgaatcgatagagcttgtctctagcgctaattgtctagaaagtgttacgtatcaagatatatcagcatttcccgaaacaattgcggtagagattaatttccgattaagcattcttcgctttttagcgcgaaagtgcgaaaccattgtggccaaatcaattgaaccacatcgtgtagagctacagcaaaactatagtagaaaaatacccagtgcaataacgatatatcgatggtggcttgcttttcgaaaatcagactacaaccccattagcttagcacctaatatcaaggatagaggtaatagagagacaaaagtgtcaacagttgttgattctattatggaacaggcagttgaaagagttatatctggacgaaaagtcaatgttagctctgcatataaacgtgttcgacgaaaagttcgtcaatacaatctaactcatggaacgaaatacacgtatcctaagtacgaatctgtaagaaagcgagtaaaaaagaaaaccccatttgagttattagccgcagggaaaggggagagagtagctaagagagagtttcgccgaatgggaaaaaagatcctcacgtctagcgtgctagagagggttgaaatagatcacactgtcgttgacctttttgcagtacacgaagagtatcgaatcccattgggccgaccttggcttactcaattggttgattgttacagtaaagctgtaatcggtttttatttaggtttcgagcctcctagctatgtgtcggtttcccttgcacttaagaatgcaatacaacgcaaagatgacttaatctcctcgtatgaatcgatcgagaatgaatggctatgttatggcatcccagacctactcgtaactgataatggtaaagagtttttgtcgaaagcatttgatcaagcatgtgaatcactattgatcaatgtgcatcaaaataaagttgagacgcccgacaacaaacctcatgttgaacgtaactacgggactattaatacttctctgttagacgatttacctgggaaatccttcagccagtaccttcaaagagaagggtacgactctgtgggagaagctacccttacactcaatgagattagagaaatttacttaatttggttggtggatatttatcataaaaaacccaatcagagaggcactaattgtcctaatgttgcgtggaaaaagggttgtcaagaatgggaaccagaggagttctctggttctaaagacgaattagactttaaatttgctattgttgattacaaacaacttactaaagtagggataactgtctacaaagaactgagttatagcaatgaccgtttagctgaatatagagggaagaaaggaaaccataaagttcagttcaagtataaccctgagtgtatggcagttatttgggtgttggatgaggatatgaatgagtactttacagttaatgcgattgactacgaatatgcaagtagagtatcactttggcaacataaatataacatgaaatatcaagcagaactaaattcagcagaatatgatgaggacaaggaaattgatgcagaaataaaaattgaagaaatcgcagatcgttcaattgttaagactaacaaaatcagagctcggaggcgtggcgctaggcatcaagagaatagcgcaagggctaagtcaatcagtaatgcgaacccggcctcgatacaaaaacatgaagatgaaatcgttagtgcagataatgacgattgggatattgattatgtctgagaaatcgtcaaatgagtgaaacgcgtgaggctcgtatatcaagagctaaaagggcatttgtatccacaccgagcgttaggaaaatcttgagttacatggatagatgtagagatctatcagacctagagtctgagcctacatgcatgatggtctatggtgcttcgggtgtaggtaaaacgaccgtcatcaagaaatacttaaatcaaaacagaagagagtccgaagccgggggcgatataataccggttttgcatattgagttgccagacaatgcgaagccagtagatgcagcaagggaattgctggttgaaatgggtgacccgctagcactttatgaaactgacttagctagattgacgaaaagactgactgaattaatccctgcggtcggcgtgaagctgattattatcgatgagttccaacatttggtggaagaaaggtcaaatcgggttcttacccaagtaggtaattggctaaaaatgatacttaacaaaacgaaatgtccaattgttatatttggtatgccatactcaaaagttgtactgcaagcaaactcgcaacttcacgggcgattttccattcaggttgaactgcgcccctttagctaccagggaggtagaggtgtatttaaaacttttttggaataccttgataaagccctaccttttgaaaaacaggctggcttagccaacgaaagtttgcagaaaaaattgtatgcattctctcagggaaacatgcgttcgttgagaaaccttatttatcaagcatctatcgaagcaattgataatcagcatgagacgataaccgaagaagatttcgtttttgcatcgaagttgacatcgggcgataaacccaactcatggaaaaatccttttgaggagggtgttgaggtaacagaagatatgttacgaccgccaccaaaagatattggttgggaggactatttgagacattcaaccccgagagtgagtaaaccaggtagaaataaaaactttttcgaataacctaggctgctggaaggagatatacatatgtttttgcaaagacctaaaccttacagcgatgaaagtttagaaagtttctttatccgagtggctaacaaaaatggctacggtgatgtccatcgcttcctagaagccactaaacgattccttcaagacattgaccataatggctatcaaacctttccgactgatataactcggataaacccatactcagctaaaaacagttccagcgcacgaactgcgtcattcctgaaacttgcacaattgacatttaatgaaccgccagagctacttgggttggcaattaacagaacaaacatgaaatactcgccgtcaactagcgcggttgttagaggtgcagaagtctttcctcgcagtttactacggacgcactccatcccctgctgtcctttgtgtctgcgagaaaatggctacgcctcctacctttggcactttcaggggtacgaatactgccacagccataacgtacctttaattaccacttgtagctgtggtaaggagtttgactaccgagtatctgggttaaagggcatttgctgcaaatgcaaggagcctatcaccttaaccagcagggagaacggtcatgaggcagcgtgtactgtttcaaactggcttgctggccatgaatctaaacctctgccaaatcttcctaaaagctaccgatggggtttagttcattggtggatgggtattaaagatagcgagttcgatcacttttcgttcgttcaatttttctcaaactggccaaggtcattccactcgataatcgaagatgaagtagagttcaaccttgagcatgctgttgtcagcacgtctgaattacgactaaaagatcttcttggtcgattgtttttcggttcaattcggttacctgagcggaatcttcaacacaatatcatccttggtgagcttctctgctatttagaaaatcgtttatggcaagacaagggattaatcgccaacctcaaaatgaacgcgttagaggcgactgtaatgttaaattgtagcctcgatcagattgcatcaatggttgaacaacgcatcttgaagccaaatcgaaaaagcaagcccaacagccctcttgatgttaccgattatctatttcatttcggcgatattttctgtctttggttagctgagttccaaagcgatgagtttaaccgttcgttttatgtgtcgaggtggtaaatgcaaactctgaaagaactaatcgcatccaatcctgacgacttaacaactgaacttaagagagcatttcgtccactcacaccgcatattgcaattgatggtaatgaacttgacgcactgacgatattagtcaatttaaccgataagactgatgatcagaaagacctgctcgatcgagccaaatgcaagcaaaaacttcgagatgaaaaatggtgggctagctgcataaattgcgttaattacagacaaagccataacccaaaattcccggatatacgttctgaaggcgtgattcgaacccaagccctgggtgaattaccgagtttcctactctcgtcctcaaaaatcccaccataccattggtcatatagccatgattcaaaatacgtcaacaaaagcgcattcctcaccaatgagttttgttgggatggtgagatctcatgtttgggtgagcttcttaaagatgcagatcacccactttggaatactttgaaaaagttaggttgttctcaaaaaacttgcaaagcaatggcaaaacaactagctgatattactctcacgactatcaatgtcacactcgcaccaaattacctgactcaaatatctctccccgatagtgatacatcctacatttcactctctcctgttgcatcgctatcgatgcaaagccactttcatcagaggctccaagatgaaaatcggcatagcgcgataacgcggtttagccgaactaccaacatgggggtcactgcgatgacatgtggcggcgcatttagaatgttaaagtctggcgctaagttttccagcccccctcatcaccgattaaacagtaaacgaagttggttgacgtcagagcatgttcagtcattaaaacagtaccagcgcctcaacaaaagcctcatacctgaaaactctcggattgcactccgtagaaaatacaaaatcgagcttcaaaatatggtcagatcttggtttgcaatgcaagaccatacccttgattcgaacatacttatccaacatttgaatcatgacctatcttacttaggagccacaaaacgttttgcatacgatccagcgatgaccaagctctttactgagcttttgaaacgagagttatcaaattcaatcaataatggtgagcaacacactaatggatcgtttttagtcctaccgaatatcagggtttgtggcgcaacagctttaagctccccggtaacggtggggattccatcacttacagctttctttggcttcgttcacgcatttgaacggaatataaatcgcaccacctcatcgtttcgtgttgaatcctttgcgatatgcgtccatcaactacatgtcgagaagcgaggtttgacagcagagtttgtggaaaaaggcgacgggactatatccgctcccgcgacccgggatgactggcagtgtgatgtcgtatttagccttattttgaacaccaactttgctcaacatattgaccaagatacgttagttacatcactaccaaagcgattggctcggggttcagcaaaaattgcgattgatgactttaaacatatcaactcattctcgacattagaaacagcgatcgaatctctgccaatagaagctggtaggtggttatcactttacgcacagtcaaacaataatctaagtgatctattagcagccatgacagaggaccatcagctcatggcaagctgcgtcggttaccacttgttagaagagcccaaagataaaccaaactccctcagaggttacaaacacgctatcgccgagtgcatcattggactcattaactcaatcacctttagctcagagactgatcccaacacaatcttttggtcgctaaagaactatcaaaactacctagtggtacagccaaggagtatcaacgatgaaactaccgacaaatctagcctatgagcgctctatcgacccatcagatgtctgtttttttgtcgtctggcccgatgatagaaaaacacctttaacctacaattctcgtactctgctcgggcaaatggaagcggcatcattagcctatgatgtctcaggtcaaccaataaaaagtgccaccgctgaggcgttagctcaagggaaccctcatcaagttgatttctgccacgttccatacggtgcgagtcatattgaatgcagtttctccgtctcgttttcttctgaactacgtcaaccatataagtgtaactcaagcaaagttaaacaaacgctagtgcaattagtcgagctctacgaaacgaaaatcggctggactgagctagcaacccgatatttgatgaacatttgcaacggtaaatggctgtggaaaaatacccgtaaagcctattgctggaacattgtacttacaccttggccttggaacggggaaaaggttggatttgaagatattcgtactaactacacctcacggcaagactttaaaaataataaaaattggtctgctatagttgaaatgatcaaaaccgcattttctagtactgatgggctggcgatatttgaagtcagggccaccttgcacttgccaacgaatgctatggtgcggccaagccaagttttcacagaaaaagaaagtggcagtaaaagtaaatctaaaactcaaaacagtcgagtttttcagagtacaactattgatggtgaacgatcgccaatactaggggcctttaaaacgggagcagctattgcaaccattgacgactggtatcctgaagccactgagccactaagggtcggacggtttggggttcatcgcgaagatgtcacttgctaccgtcatccgtctaccggaaaagattttttctcgatattacaacaagcagagcactatattgaagtgttgagcgccaacaaaactcccgctcaagaaactatcaacgacatgcactttttaatggctaacctgattaagggtgggatgttccagcataaaggagactgactgtgaaatggtattataagacaatcacctttctgccagagttgtgcaacaacgagtcactggctgcaaagtgtctccgcgttctgcatggatttaactatcagtatgagacacgaaatatcggcgtttcatttccgctttggtgtgatgcaacggttggaaaaaagatttcatttgtcagcaagaacaagatagaactcgacttactacttaaacaacactatttcgtccaaatggaacaacttcaatactttcatatatccaacactgttctcgtcccagaagattgtacatacgtttcctttagacgctgtcaatctatagataagctcacagcagcagggctggcaaggaaaatcagacgcctggagaaacgtgctctatctagaggcgagcaatttgacccatcatcttttgctcaaaaagagcatactgcaatagcgcactaccactcacttggggagtccagcaaacagacgaaccgcaactttcgactcaatatcaggatgctctcggagcaaccccgtgaggggaactcgatttttagtagctatggcttatcaaattcagaaaactcgtttcagcctgtacccttaatctgacgatataccatgggtgaactgccgagtaggtagctgataacgagacctctgtcttgtcagctagggtggtctcgtgaactgccgagtaggtagctgataacggatccgaattcgctgctgccaccgctgagcaataactagcataaccccttggggcctctaaacgggtcttgaggggttttttgctgaaacctcaggcatgttggaacaaccataaaatgataattacacccataaattgataattatcacacccataaattgatattgcctcttcatggtctaaacttcagtaagtttacgacattttcatgaagaggtcatttccggggatccatggagaaaaaaatcactggatataccaccgttgatatatcccaatggcatcgtaaagaacattttgaggcatttcagtcagttgctcaatgtacctataaccagaccgttcagctggatattacggcctttttaaagaccgtaaagaaaaataagcacaagttttatccggcctttattcacattcttgcccgcctgatgaatgctcatccggagttccgtatggcaatgaaagacggtgagctggtgatatgggatagtgttcacccttgttacaccgttttccatgagcaaactgaaacgttttcatcgctctggagtgaataccacgacgatttccggcagtttctacacatatattcgcaagatgtggcgtgttacggtgaaaacctggcctatttccctaaagggtttattgagaatatgtttttcgtctcagccaatccctgggtgagtttcaccagttttgatttaaacgtggccaatatggacaacttcttcgcccccgttttcactatgggcaaatattatacgcaaggcgacaaggtgctgatgccgctggcgattcaggttcatcatgccgtttgtgatggcttccatgtcggcagaatgcttaatgaattacaacagtactgcgatgagtggcagggcggggcgtaatttttttaaggcagttattggtgcccttctagagtccttactgcagtagttttgctgaaatactcgattcacaaaaatatcaacttatggttgttttgtgagatatcaatatatggttgttttgtggttaagttgctgattataaataattattaaatatcactttatggttgcatcaacaggtaccgagctcgaattcactggccgtcgttttacaacgtcgtgactgggaaaaccctggcgttacccaacttaatcgccttgcggccagtttgctcaggctctccccgtggaggtaataattgacgatatgatcatttattctgcctcccagagcctgataaaaacggtgaatccgttagcgaggtgccgccggcttccattcaggtcgaggtggcccggctccatgcaccgcgacgcaacgcggggaggcagacaaggtatagggcggcgaggcggctacagccgatagtctggaacagcgcacttacgggttgctgcgcaacccaagtgctaccggcgcggcagcgtgacccgtgtcggcggctccaacggctcgccatcgtccagaaaacacggctcatcgggcatcggcaggcgctgctgcccgcgccgttcccattcctccgtttcggtcaaggctggcaggtctggttccatgcccggaatgccgggctggctgggcggctcctcgccggggccggtcggtagttgctgctcgcccggatacagggtcgggatgcggcgcaggtcgccatgccccaacagcgattcgtcctggtcgtcgtgatcaaccaccacggcggcactgaacaccgacaggcgcaactggtcgcggggctggccccacgccacgcggtcattgaccacgtaggccgacacggtgccggggccgttgagcttcacgacggagatccagcgctcggccaccaagtccttgactgcgtattggaccgtccgcaaagaacgtccgatgagcttggaaagtgtcttctggctgaccaccacggcgttctggtggcccatctgcgccacgaggtgatgcagcagcattg

SEQ ID NO: 1763 - DNA, 14035 bp, Synthetic construct
  source 1..14035: mol_type = other DNA
ccgccgtgggtttcctcgcaataagcccggcccacgcctcatgcgctttgcgttccgtttgcacccagtgaccgggcttgttcttggcttgaatgccgatttctctggactgcgtggccatgcttatctccatgcggtaggggtgccgcacggttgcggcaccatgcgcaatcagctgcaacttttcggcagcgcgacaacaattatgcgttgcgtaaaagtggcagtcaattacagattttctttaacctacgcaatgagctattgcggggggtgccgcaatgagctgttgcgtaccccccttttttaagttgttgatttttaagtctttcgcatttcgccctatatctagttctttggtgcccaaagaagggcacccctgcggggttcccccacgccttcggcgcggctccccctccggcaaaaagtggcccctccggggcttgttgatcgactgcgcggccttcggccttgcccaaggtggcgctgcccccttggaacccccgcactcgccgccgtgaggctcggggggcaggcgggcgggcttcgcccttcgactgcccccactcgcataggcttgggtcgttccaggcgcgtcaaggccaagccgctgcgcggtcgctgcgcgagccttgacccgccttccacttggtgtccaaccggcaagcgaagcgcgcaggccgcaggccggaggcttttccccagagaaaattaaaaaaattgatggggcaaggccgcaggccgcgcagttggagccggtgggtatgtggtcgaaggctgggtagccggtgggcaatccctgtggtcaagctcgtgggcaggcgcagcctgtccatcagcttgtccagcagggttgtccacgggccgagcgaagcgagccagccggtggccgctcgcggccatcgtccacatatccacgggctggcaagggagcgcagcgaccgcgcagggcgaagcccggagagcaagcccgtagggcgccgcagccgccgtaggcggtcacgactttgcgaagcaaagtctagtgagtatactcaagcattgagtggcccgccggaggcaccgccttgcgctgcccccgtcgagccggttggacaccaaaagggaggggcaggcatggcggcatacgcgatcatgcgatgcaagaagctggcgaaaatgggcaacgtggcggccagtctcaagcacgcctaccgcgagcgcgagacgcccaacgctgacgccagcaggacgccagagaacgagcactgggcggccagcagcaccgatgaagcgatgggccgactgcgcgagttgctgccagagaagcggcgcaaggacgctgtgttggcggtcgagtacgtcatgacggccagcccggaatggtggaagtcggccagccaagaacagcaggcggcgttcttcgagaaggcgcacaagtggctggcggacaagtacggggcggatcgcatcgtgacggccagcatccaccgtgacgaaaccagcccgcacatgaccgcgttcgtggtgccgctgacgcaggacggcaggctgtcggccaaggagttcatcggcaacaaagcgcagatgacccgcgaccagaccacgtttgcggccgctgtggccgatctagggctgcaacggggcatcgagggcagcaaggcacgtcacacgcgcattcaggcgttctacgaggccctggagcggccaccagtgggccacgtcaccatcagcccgcaagcggtcgagccacgcgcctatgcaccgcagggattggccgaaaagctgggaatctcaaagcgcgttgagacgccggaagccgtggccgaccggctgacaaaagcggttcggcaggggtatgagcctgccctacaggccgccgcaggagcgcgtgagatgcgcaagaaggccgatcaagcccaagagacggcccgtgaccttcgggagcgcctgaagcccgttctggacgccctggggccgttgaatcgggatatgcaggccaaggccgccgcgatcatcaaggccgtgggcgaaaagctgctgacggaacagcgggaagtccagcgccagaaacaggcccagcgccagcaggaacgcgggcgcgcacatttccccgaaaagtgccacctgggatgaatgtcagctactgggctatctggacaagggaaaacgcaagcgcaaagagaaagcaggtagcttgcagtgggcttacatggcgatagctagactgggcggttttatggacagcaagcgaaccggaattgccagctggggcgccctctggtaaggttgggaagccctgcaaagtaaactggatggctttcttgccgccaaggatctgatggcgcaggggatcaagatctgatcaagagacaggatgaggatcgtttcgcatgattgaacaagatggattgcacgcaggttctccggccgcttgggtggagaggctattcggctatgactgggcacaacagacaatcggctgctctgatgccgccgtgttccggctgtcagcgcaggggcgcccggttctttttgtcaagaccgacctgtccggtgccctgaatgaactgcaagacgaggcagcgcggctatcgtggctggccacgacgggcgttccttgcgcagctgtgctcgacgttgtcactgaagcgggaagggactggctgctattgggcgaagtgccggggcaggatctcctgtcatctcaccttgctcctgccgagaaagtatccatcatggctgatgcaatgcggcggctgcatacgcttgatccggctacctgcccattcgaccaccaagcgaaacatcgcatcgagcgagcacgtactcggatggaagccggtcttgtcgatcaggatgatctggacgaagagcatcaggggctcgcgccagccgaactgttcgccaggctcaaggcgcgcatgcccgacggcgaggatctcgtcgtgacccatggcgatgcctgcttgccgaatatcatggtggaaaatggccgcttttctggattcatcgactgtggccggctgggtgtggcggaccgctatcaggacatagcgttggctacccgtgatattgctgaagagcttggcggcgaatgggctgaccgcttcctcgtgctttacggtatcgccgctcccgattcgcagcgcatcgccttctatcgccttcttgacgagttcttctgagcgggactctggggttcgaaatgaccgaccaagcgacgcccaacctgccatcacgagatttcgattccaccgccgccttctatgaaaggttgggcttcggaatcgttttccgggacgccggctggatgatcctccagcgcggggatctcatgctggagttcttcgcccacccccatgggcaaatattatacgcaaggcgacaaggtgctgatgccgctggcgattcaggttcatcatgccgtttgtgatggcttccatgtcggcagaatgcttaatgaattacaacagtttttatgcatgcgcccaatacgcaaaccgcctctccccgcgcgttggccgattcattaatgcagctggcacgacaggtttcccgactggtggataaccgtattaccgcctttgagtgagctgataccgctcgccgcagccgaacgaccgagcgcagcgagtcagtgagcgaggacacaagctttgacagctagctcagtcctaggtataatactagcgtcgacaggatccgaattcgagctcggtataaggagatataccatggcgacaagtttacctacgccctcagcaattacgacttcggcgttagagtatgcattccatactcccgctcgcaatctaacgaaatctcgcggaaaaaacattcatcgttatgtcagtgtaaagatgagtaagaggattacggtagaatctactctagagtgtgatgcctgctatcactttgattttgagccaagtattgttcgcttttgcgctcaaccgattcgatttttatattatctcaatggtcagtctcactcctatgttcctgactttctagttcaatttgataccaacgagtttgttctatatgaagtaaagtcagcttatgctaagaacaaacctgattttgatgttgaatgggaggcgaaagtaaaagcagcaactgaactagggctagaattggagcttgttgaagagagtgatattagggatacggttgtattaaataatcttaagcgcatgcatcgttatgcttcgaaagatgagctgaataacgtacataactctctcttaaaaataataaagtacaatggcgcccaatctgcaagatgcttgggagaacagttgggtttaaaaggccgaactgttttaccaattttgtgcgatttgctgtcaaggtgtttactcgatacacgtttggataagcctctatctcttgaatctcgatttgagttggccagttatggctaagaaagggttctcaagtttccatagaaaagcagtctcttcccaagatacgcttgaatcgatagagcttgtctctagcgctaattgtctagaaagtgttacgtatcaagatatatcagcatttcccgaaacaattgcggtagagattaatttccgattaagcattcttcgctttttagcgcgaaagtgcgaaaccattgtggccaaatcaattgaaccacatcgtgtagagctacagcaaaactatagtagaaaaatacccagtgcaataacgatatatcgatggtggcttgcttttcgaaaatcagactacaaccccattagcttagcacctaatatcaaggatagaggtaatagagagacaaaagtgtcaacagttgttgattctattatggaacaggcagttgaaagagttatatctggacgaaaagtcaatgttagctctgcatataaacgtgttcgacgaaaagttcgtcaatacaatctaactcatggaacgaaatacacgtatcctaagtacgaatctgtaagaaagcgagtaaaaaagaaaaccccatttgagttattagccgcagggaaaggggagagagtagctaagagagagtttcgccgaatgggaaaaaagatcctcacgtctagcgtgctagagagggttgaaatagatcacactgtcgttgacctttttgcagtacacgaagagtatcgaatcccattgggccgaccttggcttactcaattggttgattgttacagtaaagctgtaatcggtttttatttaggtttcgagcctcctagctatgtgtcggtttcccttgcacttaagaatgcaatacaacgcaaagatgacttaatctcctcgtatgaatcgatcgagaatgaatggctatgttatggcatcccagacctactcgtaactgataatggtaaagagtttttgtcgaaagcatttgatcaagcatgtgaatcactattgatcaatgtgcatcaaaataaagttgagacgcccgacaacaaacctcatgttgaacgtaactacgggactattaatacttctctgttagacgatttacctgggaaatccttcagccagtaccttcaaagagaagggtacgactctgtgggagaagctacccttacactcaatgagattagagaaatttacttaatttggttggtggatatttatcataaaaaacccaatcagagaggcactaattgtcctaatgttgcgtggaaaaagggttgtcaagaatgggaaccagaggagttctctggttctaaagacgaattagactttaaatttgctattgttgattacaaacaacttactaaagtagggataactgtctacaaagaactgagttatagcaatgaccgtttagctgaatatagagggaagaaaggaaaccataaagttcagttcaagtataaccctgagtgtatggcagttatttgggtgttggatgaggatatgaatgagtactttacagttaatgcgattgactacgaatatgcaagtagagtatcactttggcaacataaatataacatgaaatatcaagcagaactaaattcagcagaatatgatgaggacaaggaaattgatgcagaaataaaaattgaagaaatcgcagatcgttcaattgttaagactaacaaaatcagagctcggaggcgtggcgctaggcatcaagagaatagcgcaagggctaagtcaatcagtaatgcgaacccggcctcgatacaaaaacatgaagatgaaatcgttagtgcagataatgacgattgggatattgattatgtctgagaaatcgtcaaatgagtgaaacgcgtgaggctcgtatatcaagagctaaaagggcatttgtatccacaccgagcgttaggaaaatcttgagttacatggatagatgtagagatctatcagacctagagtctgagcctacatgcatgatggtctatggtgcttcgggtgtaggtaaaacgaccgtcatcaagaaatacttaaatcaaaacagaagagagtccgaagccgggggcgatataataccggttttgcatattgagttgccagacaatgcgaagccagtagatgcagcaagggaattgctggttgaaatgggtgacccgctagcactttatgaaactgacttagctagattgacgaaaagactgactgaattaatccctgcggtcggcgtgaagctgattattatcgatgagttccaacatttggtggaagaaaggtcaaatcgggttcttacccaagtaggtaattggctaaaaatgatacttaacaaaacgaaatgtccaattgttatatttggtatgccatactcaaaagttgtactgcaagcaaactcgcaacttcacgggcgattttccattcaggttgaactgcgcccctttagctaccagggaggtagaggtgtatttaaaacttttttggaataccttgataaagccctaccttttgaaaaacaggctggcttagccaacgaaagtttgcagaaaaaattgtatgcattctctcagggaaacatgcgttcgttgagaaaccttatttatcaagcatctatcgaagcaattgataatcagcatgagacgataaccgaagaagatttcgtttttgcatcgaagttgacatcgggcgataaacccaactcatggaaaaatccttttgaggagggtgttgaggtaacagaagatatgttacgaccgccaccaaaagatattggttgggaggactatttgagacattcaaccccgagagtgagtaaaccaggtagaaataaaaactttttcgaataacctaggctgctggaaggagatatacatatgtttttgcaaagacctaaaccttacagcgatgaaagtttagaaagtttctttatccgagtggctaacaaaaatggctacggtgatgtccatcgcttcctagaagccactaaacgattccttcaagacattgaccataatggctatcaaacctttccgactgatataactcggataaacccatactcagctaaaaacagttccagcgcacgaactgcgtcattcctgaaacttgcacaattgacatttaatgaaccgccagagctacttgggttggcaattaacagaacaaacatgaaatactcgccgtcaactagcgcggttgttagaggtgcagaagtctttcctcgcagtttactacggacgcactccatcccctgctgtcctttgtgtctgcgagaaaatggctacgcctcctacctttggcactttcaggggtacgaatactgccacagccataacgtacctttaattaccacttgtagctgtggtaaggagtttgactaccgagtatctgggttaaagggcatttgctgcaaatgcaaggagcctatcaccttaaccagcagggagaacggtcatgaggcagcgtgtactgtttcaaactggcttgctggccatgaatctaaacctctgccaaatcttcctaaaagctaccgatggggtttagttcattggtggatgggtattaaagatagcgagttcgatcacttttcgttcgttcaatttttctcaaactggccaaggtcattccactcgataatcgaagatgaagtagagttcaaccttgagcatgctgttgtcagcacgtctgaattacgactaaaagatcttcttggtcgattgtttttcggttcaattcggttacctgagcggaatcttcaacacaatatcatccttggtgagcttctctgctatttagaaaatcgtttatggcaagacaagggattaatcgccaacctcaaaatgaacgcgttagaggcgactgtaatgttaaattgtagcctcgatcagattgcatcaatggttgaacaacgcatcttgaagccaaatcgaaaaagcaagcccaacagccctcttgatgttaccgattatctatttcatttcggcgatattttctgtctttggttagctgagttccaaagcgatgagtttaaccgttcgttttatgtgtcgaggtggtaaatgcaaactctgaaagaactaatcgcatccaatcctgacgacttaacaactgaacttaagagagcatttcgtccactcacaccgcatattgcaattgatggtaatgaacttgacgcactgacgatattagtcaatttaaccgataagactgatgatcagaaagacctgctcgatcgagccaaatgcaagcaaaaacttcgagatgaaaaatggtgggctagctgcataaattgcgttaattacagacaaagccataacccaaaattcccggatatacgttctgaaggcgtgattcgaacccaagccctgggtgaattaccgagtttcctactctcgtcctcaaaaatcccaccataccattggtcatatagccatgattcaaaatacgtcaacaaaagcgcattcctcaccaatgagttttgttgggatggtgagatctcatgtttgggtgagcttcttaaagatgcagatcacccactttggaatactttgaaaaagttaggttgttctcaaaaaacttgcaaagcaatggcaaaacaactagctgatattactctcacgactatcaatgtcacactcgcaccaaattacctgactcaaatatctctccccgatagtgatacatcctacatttcactctctcctgttgcatcgctatcgatgcaaagccactttcatcagaggctccaagatgaaaatcggcatagcgcgataacgcggtttagccgaactaccaacatgggggtcactgcgatgacatgtggcggcgcatttagaatgttaaagtctggcgctaagttttccagcccccctcatcaccgattaaacagtaaacgaagttggttgacgtcagagcatgttcagtcattaaaacagtaccagcgcctcaacaaaagcctcatacctgaaaactctcggattgcactccgtagaaaatacaaaatcgagcttcaaaatatggtcagatcttggtttgcaatgcaagaccatacccttgattcgaacatacttatccaacatttgaatcatgacctatcttacttaggagccacaaaacgttttgcatacgatccagcgatgaccaagctctttactgagcttttgaaacgagagttatcaaattcaatcaataatggtgagcaacacactaatggatcgtttttagtcctaccgaatatcagggtttgtggcgcaacagctttaagctccccggtaacggtggggattccatcacttacagctttctttggcttcgttcacgcatttgaacggaatataaatcgcaccacctcatcgtttcgtgttgaatcctttgcgatatgcgtccatcaactacatgtcgagaagcgaggtttgacagcagagtttgtggaaaaaggcgacgggactatatccgctcccgcgacccgggatgactggcagtgtgatgtcgtatttagccttattttgaacaccaactttgctcaacatattgaccaagatacgttagttacatcactaccaaagcgattggctcggggttcagcaaaaattgcgattgatgactttaaacatatcaactcattctcgacattagaaacagcgatcgaatctctgccaatagaagctggtaggtggttatcactttacgcacagtcaaacaataatctaagtgatctattagcagccatgacagaggaccatcagctcatggcaagctgcgtcggttaccacttgttagaagagcccaaagataaaccaaactccctcagaggttacaaacacgctatcgccgagtgcatcattggactcattaactcaatcacctttagctcagagactgatcccaacacaatcttttggtcgctaaagaactatcaaaactacctagtggtacagccaaggagtatcaacgatgaaactaccgacaaatctagcctatgagcgctctatcgacccatcagatgtctgtttttttgtcgtctggcccgatgatagaaaaacacctttaacctacaattctcgtactctgctcgggcaaatggaagcggcatcattagcctatgatgtctcaggtcaaccaataaaaagtgccaccgctgaggcgttagctcaagggaaccctcatcaagttgatttctgccacgttccatacggtgcgagtcatattgaatgcagtttctccgtctcgttttcttctgaactacgtcaaccatataagtgtaactcaagcaaagttaaacaaacgctagtgcaattagtcgagctctacgaaacgaaaatcggctggactgagctagcaacccgatatttgatgaacatttgcaacggtaaatggctgtggaaaaatacccgtaaagcctattgctggaacattgtacttacaccttggccttggaacggggaaaaggttggatttgaagatattcgtactaactacacctcacggcaagactttaaaaataataaaaattggtctgctatagttgaaatgatcaaaaccgcattttctagtactgatgggctggcgatatttgaagtcagggccaccttgcacttgccaacgaatgctatggtgcggccaagccaagttttcacagaaaaagaaagtggcagtaaaagtaaatctaaaactcaaaacagtcgagtttttcagagtacaactattgatggtgaacgatcgccaatactaggggcctttaaaacgggagcagctattgcaaccattgacgactggtatcctgaagccactgagccactaagggtcggacggtttggggttcatcgcgaagatgtcacttgctaccgtcatccgtctaccggaaaagattttttctcgatattacaacaagcagagcactatattgaagtgttgagcgccaacaaaactcccgctcaagaaactatcaacgacatgcactttttaatggctaacctgattaagggtgggatgttccagcataaaggagactgactgtgaaatggtattataagacaatcacctttctgccagagttgtgcaacaacgagtcactggctgcaaagtgtctccgcgttctgcatggatttaactatcagtatgagacacgaaatatcggcgtttcatttccgctttggtgtgatgcaacggttggaaaaaagatttcatttgtcagcaagaacaagatagaactcgacttactacttaaacaacactatttcgtccaaatggaacaacttcaatactttcatatatccaacactgttctcgtcccagaagattgtacatacgtttcctttagacgctgtcaatctatagataagctcacagcagcagggctggcaaggaaaatcagacgcctggagaaacgtgctctatctagaggcgagcaatttgacccatcatcttttgctcaaaaagagcatactgcaatagcgcactaccactcacttggggagtccagcaaacagacgaaccgcaactttcgactcaatatcaggatgctctcggagcaaccccgtgaggggaactcgatttttagtagctatggcttatcaaattcagaaaactcgtttcagcctgtacccttaatctgacgatataccatgggtgaactgccgagtaggtagctgataacagtgcatcctcggccacgaattctgcggccacgtgaactgccgagtaggtagctgataacggatccgaattcgctgctgccaccgctgagcaataactagcataaccccttggggcctctaaacgggtcttgaggggttttttgctgaaacctcaggcatgttggaacaaccataaaatgataattacacccataaattgataattatcacacccataaattgatattgcctcttcatggtctaaacttcagtaagtttacgacattttcatgaagaggtcatttccggggatccatggagaaaaaaatcactggatataccaccgttgatatatcccaatggcatcgtaaagaacattttgaggcatttcagtcagttgctcaatgtacctataaccagaccgttcagctggatattacggcctttttaaagaccgtaaagaaaaataagcacaagttttatccggcctttattcacattcttgcccgcctgatgaatgctcatccggagttccgtatggcaatgaaagacggtgagctggtgatatgggatagtgttcacccttgttacaccgttttccatgagcaaactgaaacgttttcatcgctctggagtgaataccacgacgatttccggcagtttctacacatatattcgcaagatgtggcgtgttacggtgaaaacctggcctatttccctaaagggtttattgagaatatgtttttcgtctcagccaatccctgggtgagtttcaccagttttgatttaaacgtggccaatatggacaacttcttcgcccccgttttcactatgggcaaatattatacgcaaggcgacaaggtgctgatgccgctggcgattcaggttcatcatgccgtttgtgatggcttccatgtcggcagaatgcttaatgaattacaacagtactgcgatgagtggcagggcggggcgtaatttttttaaggcagttattggtgcccttctagagtccttactgcagtagttttgctgaaatactcgattcacaaaaatatcaacttatggttgttttgtgagatatcaatatatggttgttttgtggttaagttgctgattataaataattattaaatatcactttatggttgcatcaacaggtaccgagctcgaattcactggccgtcgttttacaacgtcgtgactgggaaaaccctggcgttacccaacttaatcgccttgcggccagtttgctcaggctctccccgtggaggtaataattgacgatatgatcatttattctgcctcccagagcctgataaaaacggtgaatccgttagcgaggtgccgccggcttccattcaggtcgaggtggcccggctccatgcaccgcgacgcaacgcggggaggcagacaaggtatagggcggcgaggcggctacagccgatagtctggaacagcgcacttacgggttgctgcgcaacccaagtgctaccggcgcggcagcgtgacccgtgtcggcggctccaacggctcgccatcgtccagaaaacacggctcatcgggcatcggcaggcgctgctgcccgcgccgttcccattcctccgtttcggtcaaggctggcaggtctggttccatgcccggaatgccgggctggctgggcggctcctcgccggggccggtcggtagttgctgctcgcccggatacagggtcgggatgcggcgcaggtcgccatgccccaacagcgattcgtcctggtcgtcgtgatcaaccaccacggcggcactgaacaccgacaggcgcaactggtcgcggggctggccccacgccacgcggtcattgaccacgtaggccgacacggtgccggggccgttgagcttcacgacggagatccagcgctcggccaccaagtccttgactgcgtattggaccgtccgcaaagaacgtccgatgagcttggaaagtgtcttctggctgaccaccacggcgttctggtggcccatctgcgccacgaggtgatgcagcagcattg

SEQ ID NO: 1764 - DNA, 3665 bp, Synthetic construct
  source 1..3665: mol_type = other DNA
gacgaaagggcctcgtgatacgcctatttttataggttaatgtcatgataataatggtttcttagacgtcaggtggcacttttcggggaaatgtgcgcggaacccctatttgtttatttttctaaatacattcaaatatgtatccgctcatgagacaataaccctgataaatgcttcaataatattgaaaaaggaagagtatgagtattcaacatttccgtgtcgcccttattcccttttttgcggcattttgccttcctgtttttgctcacccagaaacgctggtgaaagtaaaagatgctgaagatcagttgggtgcacgagtgggttacatcgaactggatctcaacagcggtaagatccttgagagttttcgccccgaagaacgttttccaatgatgagcacttttaaagttctgctatgtggcgcggtattatcccgtattgacgccgggcaagagcaactcggtcgccgcatacactattctcagaatgacttggttgagtactcaccagtcacagaaaagcatcttacggatggcatgacagtaagagaattatgcagtgctgccataaccatgagtgataacactgcggccaacttacttctgacaacgatcggaggaccgaaggagctaaccgcttttttgcacaacatgggggatcatgtaactcgccttgatcgttgggaaccggagctgaatgaagccataccaaacgacgagcgtgacaccacgatgcctgtagcaatggcaacaacgttgcgcaaactattaactggcgaactacttactctagcttcccggcaacaattaatagactggatggaggcggataaagttgcaggaccacttctgcgctcggcccttccggctggctggtttattgctgataaatctggagccggtgagcgtggctctcgcggtatcattgcagcactggggccagatggtaagccctcccgtatcgtagttatctacacgacggggagtcaggcaactatggatgaacgaaatagacagatcgctgagataggtgcctcactgattaagcattggtaactgtcagaccaagtttactcatatatactttagattgatttaaaacttcatttttaatttaaaaggatctaggtgaagatcctttttgataatctcatgaccaaaatcccttaacgtgagttttcgttccactgagcgtcagaccccgtagaaaagatcaaaggatcttcttgagatcctttttttctgcgcgtaatctgctgcttgcaaacaaaaaaaccaccgctaccagcggtggtttgtttgccggatcaagagctaccaactctttttccgaaggtaactggcttcagcagagcgcagataccaaatactgttcttctagtgtagccgtagttaggccaccacttcaagaactctgtagcaccgcctacatacctcgctctgctaatcctgttaccagtggctgctgccagtggcgataagtcgtgtcttaccgggttggactcaagacgatagttaccggataaggcgcagcggtcgggctgaacggggggttcgtgcacacagcccagcttggagcgaacgacctacaccgaactgagatacctacagcgtgagctatgagaaagcgccacgcttcccgaagggagaaaggcggacaggtatccggtaagcggcagggtcggaacaggagagcgcacgagggagcttccagggggaaacgcctggtatctttatagtcctgtcgggtttcgccacctctgacttgagcgtcgatttttgtgatgctcgtcaggggggcggagcctatggaaaaacgccagcaacgcggcctttttacggttcctggccttttgctggccttttgctcacatgttctttcctgcgttatcccctgattctgtggataaccgtattaccgcctttgagtgagctgataccgctcgccgcagccgaactaccgagcgcagcgagtcagtgagcgaggaagcggaagagcgcccaatacgcaaaccgcctctccccgcgcgttggccgattcattaatgcagcccaagctttgttggaacaaccataaaatgataattacacccataaattgataattatcacacccataaattgatattgcctcttcatggtctaaacttcagtaagtttacgacattttcctcgaggtaatacgactcactatagggtgactcggaattgtgagcggataacaattcctgactccatgggtgaactgccgagtaggtagctgataacagtacagcgcggctgaaatcatcattaaagcggtgaactgccgagtaggtagctgataacggatccagtcagactgtcactagcataaccccttggggcctctaaacgggtcttgaggggttttttgctagctcgaacatggagaaaaaaatcactggatataccaccgttgatatatcccaatggcatcgtaaagaacattttgaggcatttcagtcagttgctcaatgtacctataaccagaccgttcagctggatattacggcctttttaaagaccgtaaagaaaaataagcacaagttttatccggcctttattcacattcttgcccgcctgatgaatgctcatccggagttccgtatggcaatgaaagacggtgagctggtgatatgggatagtgttcacccttgttacaccgttttccatgagcaaactgaaacgttttcatcgctctggagtgaataccacgacgatttccggcagtttctacacatatattcgcaagatgtggcgtgttacggtgaaaacctggcctatttccctaaagggtttattgagaatatgtttttcgtctcagccaatccctgggtgagtttcaccagttttgatttaaacgtggccaatatggacaacttcttcgcccccgttttcactatgggcaaatattatacgcaaggcgacaaggtgctgatgccgctggcgattcaggttcatcatgccgtttgtgatggcttccatgtcggcagaatgcttaatgaattacaacagtactgcgatgagtggcagggcggggcgtaatttttttaaggcagttattggtgcccttctagagtccttactgcagtagttttgctgaaatactcgattcacaaaaatatcaacttatggttgttttgtgagatatcaatatatggttgttttgtggttaagttgctgattataaataattattaaatatcactttatggttgcatcaacaggtaccgagctcgaattcactggccgtcgttttacaacgtcgtgactgggaaaaccctggcgttacccaacttaatcgccttgcagcacatccccctttcgccagctggcgtaatagcgaagaggcccgcaccgatcgcccttcccaacagttgcgcagcctgaatggcgaatggcgcctgatgcggtattttctccttacgcatctgtgcggtatttcacaccgcatatggtgcactctcagtacaatctgctctgatgccgcatagttaagccagccccgacacccgccaacacccgctgacgcgccctgacgggcttgtctgctcccggcatccgcttacagacaagctgtgaccgtctccgggagctgcatgtgtcagaggttttcaccgtcatcaccgaaacgcgcga

SEQ ID NO: 1765 - DNA, 21 bp, Synthetic construct
  source 1..21: mol_type = other DNA
ctgaacttcagcctccagtac

SEQ ID NO: 1766 - DNA, 20 bp, Synthetic construct
  source 1..20: mol_type = other DNA
ccatgtcggcagaatgctta

SEQ ID NO: 1767 - DNA, 10375 bp, Synthetic construct
  source 1..10375: mol_type = other DNA
ttttctactgaaccgctctagatttcagtgcaatttatctcttcaaatgtagcacctgaagtcagccccatacgatataagttgtaattctcatgttagtcatgccccgcgcccaccggaaggagctgactgggttgaaggctctcaagggcatcggtcgagatcccggtgcctaatgagtgagctaacttacattaattgcgttgcgctcactgcccgctttccagtcgggaaacctgtcgtgccagctgcattaatgaatcggccaacgcgcggggagaggcggtttgcgtattgggcgccagggtggtttttcttttcaccagtgagacgggcaacagctgattgcccttcaccgcctggccctgagagagttgcagcaagcggtccacgctggtttgccccagcaggcgaaaatcctgtttgatggtggttaacggcgggatataacatgagctgtcttcggtatcgtcgtatcccactaccgagatgtccgcaccaacgcgcagcccggactcggtaatggcgcgcattgcgcccagcgccatctgatcgttggcaaccagcatcgcagtgggaacgatgccctcattcagcatttgcatggtttgttgaaaaccggacatggcactccagtcgccttcccgttccgctatcggctgaatttgattgcgagtgagatatttatgccagccagccagacgcagacgcgccgagacagaacttaatgggcccgctaacagcgcgatttgctggtgacccaatgcgaccagatgctccacgcccagtcgcgtaccgtcttcatgggagaaaataatactgttgatgggtgtctggtcagagacatcaagaaataacgccggaacattagtgcaggcagcttccacagcaatggcatcctggtcatccagcggatagttaatgatcagcccactgacgcgttgcgcgagaagattgtgcaccgccgctttacaggcttcgacgccgcttcgttctaccatcgacaccaccacgctggcacccagttgatcggcgcgagatttaatcgccgcgacaatttgcgacggcgcgtgcagggccagactggaggtggcaacgccaatcagcaacgactgtttgcccgccagttgttgtgccacgcggttgggaatgtaattcagctccgccatcgccgcttccactttttcccgcgttttcgcagaaacgtggctggcctggttcaccacgcgggaaacggtctgataagagacaccggcatactctgcgacatcgtataacgttactggtttcacattcaccaccctgaattgactctcttccgggcgctatcatgccataccgcgaaaggttttgcgccattcgatggtgtccgggatctcgacgctctcccttatgcgactcctgctaatacgactcactatagggtactaatagcgccgcagttcatgctctttaagagtctctgtactgtggaaaatctgggttagtttgacggttggaaaaccgttttgctttctgaccctggtagctgcccgcttctcatgctctgacttttcacgttatgtggaaaaagtaacgtaatttcgttagttaagacttaccgtaaaaagtcagttctgatgctgctgtcgcaagacaggataggtgcgctcccagcaaaaggagtatgtcttgaaaaagactagccgttctagtaacggtgcggattaccgcagtggtggctactgaatcacccccttcgtcgggggaaccctccaaaaggtgggttgaaagttcgacgttcagacgtagtgtgagtaccctagcataaccccttggggcctctaaacgggtcttgaggggttttttggtcgaacagaaagtaatcgtattgtacacggccgcataatcgaaattaatacgactcactataggggaattgtgagcggataacaattccccatcttagtatattagttaagtataagaaggagatatacatatgagcacaatcacgattcaatgccgcctagttgcagaagaagcgaccctgcgctacttttgggaacttatggctgagaagaatacgccactcattaatgaattgttggagcagttaggacaacatccagattttgatacttgggtacaagcaggcaagatgcctgaaaagacagttgagaacttgtgcaagtccctagaagatcgagaaccttttgcaaatcagcccggtcgttttcgtacttcggcagttgctctggtaaagtacatttacaaatcctggtttgcgttacaaaaacgtcgggcggacagactagaaggtaaagagcgctggttaaagatgctcaaaagtgatgtggaactggaacgagaaagcaactgtagtttggatattattcgagctaaagctggggaaattcttgctaaagttactgaggggtgcgctccgagcaatcaaacatcctctaagagaaaaaagaagaaaactaaaaaaagccaagcgacaaaagatctccctacgcttttcgagattatattaaaggcttacgaacaagctgaagaaagcctgacacgagctgcccttgcttatctccttaaaaatgactgtgaagtcagtgaagttgatgaagattcagagaaatttaaaaagcgtcggcgtaaaaaggaaatagaaattgaacgtttaagaaatcaactgaaaagtcggatacctaaaggtcgcgatttaaccggagataagtggttgaaaacgctagaagaagccacccgaaatgttcctgaaaatgaggatgaggcaaaggcttggcaagcccaactcttgagagaagctagttctgttccttttcctgtagcttatgaaactagtgaagatatgacttggtttaccaacgagcaaggtcgaatctttgtttactttaatggttcagccaaacataaatttcaagtttattgcgatcgccgtcaacttcattggtttcaacgttttgtagaggactttcaaatcaagaaaaatggtgataaaaaaggtagcgaaaaggagtaccctgctgggttattgacgctttgttccactcgtctgagatggaaagaaagcgcggaaaaaggagatccttggaatgttcatcgcctaattctttcttgcactatcgatacacgcttatggacacttgaaggaacggaacaggtgcgagctgaaaagatcgctcaggttgaaaaaactattagcaagcgggagcaagaagttaatctgagtaagactcaacttgagcgtttacaagccaagcacagtgagagggagagattgaacaacatttttcccaaccgccctagcaagcccagttaccggggtaaatctcatattgcgatcggtgtaagtttcagtttggaaaacccagccactgttgccgtcgtagatgttgcaaccaagaaagtccttacttaccgcagtttcaaacaattactcggagataactacaaccttgcaaaccggctgcggcaacaaaagcaacgtctttctcacgaacgtcacaaagctcagaaacaaggcgcaccaaattcatttggagactcagagttagggcagtatgtagacagattgcttgcaaaatcgattgtcgcgatcgcaaaaacttatcaagctagtagtattgtcttgcctaaacttcgctatatgagggaaatcatacataatgaagttcaagctaaagccgaaaaaaagattccaggatataaagaaggtcaaaaacaatatgccaaacagtatcggataagcgttcatcaatggagttataatagattatcacagattcttgaaagccaagctacaaaagctggaatttctattgaacgtggatcgcaagtaatccaaggtagctcccaagaacaagcacgagatttagctttatttgcctataacgaacgccaacttagtctgggttagtaacctttaataaggagatataccatgggcttagacgaagaatttgagttcactgaggaattgacgcaagctccagatgttattgtgcttgacaagagtcattttgtggtagacccatcccaaattattctgcaaacatcggataagcataaactgagatttaatcttatcaagtggttcgctgaatcccccaacattactattaaatctcagagaaaacaggcagtcgtagatacccttggtgtttctactcggcaggtggagcgtctcctcaagcaatatcataatggtgagttatcagagacagcgggagtacaacgctcagataaggggaaacttcgcatcagccaatactgggaagattatattaaaacaacttatgaaaaaagtctgaaagataaacatccaatgttgccagcagctgtcgtgcgggaagtgaagcgacacgcgatcgttgacctcggactgaaaccaggagattatccccatccagccaccatctatagaaatttagctcctttaatcgagcaacacacgcggaagaaaaaagttagaaatccgggttcgggatcttggctgaccgttgtcacgcgagatggtcagctactgaaggctgactttagtaaccaaattatccaatgcgaccataccgagctggatattcatatagttgatagtcatggcagtttattgtctgaccgtccttggctaactactgttgtcgatacttattcaagttgcattcttggttttcatttatggatcaaacaaccaggttctacggaggtagctcttgccttgagacacgccattctacccaaaaattatccagaggactacaaacttggcaaagtttgggaaatatatggacctccttttcagtatttttttactgatggtggaaaagattttaattcaaagcatctaaaagccattggtaagaaattaggatttcagtgcgaactacgcaatcgcccgccccaaggtggaattgtagaacgtctttttaaaaccattaatactcaagttcttaaagagcttcccggttacacgggggcaaacgttcaagaacgcccgaaaaatgcagagaaagaagcctgtttaacaatacaggatttggataaaattctagccagcttcttttgtgatatttataaccacgaaccctatcccaaggagcctcgcaacacgagatttgaacgctggtttaaaggtatggggggaaaattacccgaacctttggacgagcgagaattggatatttgtttgatgaaagaagcacaacgagttgttcaagctcatggtagcatacagtttgaaaacctaatttatcgaggagaagctctgaaggcatatagaggtgaatacgtcaccctaagatacgatcccgaccatgtcctgactttatatgtctatagttgcgaagctgatgataatgcagaagagttcttgggctatgctcacgctataaacatggatactcatgacttgagtatagaagaattgaaaactctcaataaagaacgaagtaaagctcgtagcgatcattacaactatgatgctttattagcattgggtaaacgcaaagaacttgtagaagaaagaaaacaagacaagaaagcaaaaaggcaatcagagcaaaaacgtctccgcactgcttccaagaaaaactcaaatgttattgaactacgcaaaagtagagcttcgagttcttcaagtaaagatgaccgacaggaaattttaccagagagagtttctagggacgaactaaagccggagaaaacagaactgaaatatgaggaaaatctgttagcacagaccgatactcaaaaacaggagagacataagttagttgtctctgaccgtaaaaaaaatttaaagaacatttggtgataaaggaggtaaataatggccatatctcaactggcaacccaaccatttgtcgaagtcttacctccagagttagatagcaaagctcaaattgctaaaactattgatattgaggagcttttcagaattaattttatcacaaccgatcggtcatcagaatgtttcagatggttagatgagctgcgtatcctgaaacaatgcggtcggatcattggaccaagaaatgtaggcaaaagccgagcagtgcttcactatcgtaatgaggataaaaaacgagtttcttatgtaaaggcttggtcggcatcgagttctaaacgtctattttcacaaatcttaaaggatattaaccatgctgcatcaacaggtaaacgacaggatttacgtccaagattagctggtagtcttgaactatttggattagaattggtcattgttgataatgctgaaaatcttcaaaaagaggcgctcttagatttaaagcaactttttgaagaatgccatgttcctattgtcttagttggaggtaaggagttagatgatattttagaagattttgatttgttgactaactttccaacgttatatgagtttgaacgattggaacatgatgattttataaaaacattaaagacaatcgaattggatattttatctcttccagaagcgtctaagttaagtgagggtaacatatttgcaattttagctgagagtacaggtgggaaaataggaattttagtcaagatactaactaaagcagttttacattctcttaaaaagggatttggtaaagttgatgaaagcattttagaaaaaatcgcaagtcgttatggaacaaaatacgttcccattgaaaacaaaaatagaaacgattaatagaggaggatataaatgattgaagatgatgaaattcgtctaaggttgggctatgttgaaccacacccaggtgaaagcatcagtcattatttgggacggcttcgtcgatttaaggctaacagccttccttcaggatatgctctaggaaaaattgcgggtcttgggtctgttctgactcgatgggaaaagttgtacttcaacccatttcccactcaacaagaactagaggcattagcacaagtgattcaagtggaggttgagaaattaagagagatgctacccactaaaggtgtcacaatgatgcctcgacccattcgattatgtgcggcttgctatgcagagtcaccttatcaccggatcgagtggcagtttaaggacaaaatgaagtgcgatcgccatcagttgcgcttattaacaaaatgcacaaactgtcagacaccattccccattcctgctgattgggaaaaaggagaatgctcgcattgttttttgtcttttgctaagatggtgaagtgtcaaaagcgtcgttagtaacctaggctgctgccaccgctgagcaataactagcataaccccttggggcctctaaacgggtcttgaggggttttttgctgaaacctcaggcatttgagaagcacacggtcacactgcttccggtagtcaataaagcctgcagcaaagactacctacttaaatgaaccgcaaatgtacattcgcaaattaaatgtcgtaattcgcaaatttgtgtcgtttttcgcaaattaatgtcgtttagaatagtttgtctcatcaattcaattataggaacttttcgcaaattaatgtcgtcctgtttctccatttagtgtcgattaacaaattaatgtcgctgttaacgaattaatgtcgtcgaattagttccaactaacgttaacaaattaatgtcgtctaacataatgtcttgctaggatccatggagaaaaaaatcactggatataccaccgttgatatatcccaatggcatcgtaaagaacattttgaggcatttcagtcagttgctcaatgtacctataaccagaccgttcagctggatattacggcctttttaaagaccgtaaagaaaaataagcacaagttttatccggcctttattcacattcttgcccgcctgatgaatgctcatccggagttccgtatggcaatgaaagacggtgagctggtgatatgggatagtgttcacccttgttacaccgttttccatgagcaaactgaaacgttttcatcgctctggagtgaataccacgacgatttccggcagtttctacacatatattcgcaagatgtggcgtgttacggtgaaaacctggcctatttccctaaagggtttattgagaatatgtttttcgtctcagccaatccctgggtgagtttcaccagttttgatttaaacgtggccaatatggacaacttcttcgcccccgttttcactatgggcaaatattatacgcaaggcgacaaggtgctgatgccgctggcgattcaggttcatcatgccgtttgtgatggcttccatgtcggcagaatgcttaatgaattacaacagtactgcgatgagtggcagggcggggcgtaatttttttaaggcagttattggtgcccttctagaaaaaccactgattaacactttaggtactaaagtaccactaatgtggcaaaaatgcgacatctaatttgcgaaacaggcaaatcttaataaacgacatttaatttgcgaaaataggatttgcgacatctaatttgcgaaacaggcaaattactcagttttatggataaatagcttgtaagtcctacgcaataaagatctcagctattagaagtaattgcgacactaatttgcgaattgcgacatataatttgcgaatgtacaccaagctttaaaccagcaatagacataagcggctatttaacgaccctgccctgaaccgacgaccgggtcatcgtggccggatcttgcggcccctcggcttgaacgaattgttagacattatttgccgactaccttggtgatctcgcctttcacgtagtggacaaattcttccaactgatctgcgcgcgaggccaagcgatcttcttcttgtccaagataagcctgtctagcttcaagtatgacgggctgatactgggccggcaggcgctccattgcccagtcggcagcgacatccttcggcgcgattttgccggttactgcgctgtaccaaatgcgggacaacgtaagcactacatttcgctcatcgccagcccagtcgggcggcgagttccatagcgttaaggtttcatttagcgcctcaaatagatcctgttcaggaaccggatcaaagagttcctccgccgctggacctaccaaggcaacgctatgttctcttgcttttgtcagcaagatagccagatcaatgtcgatcgtggctggctcgaagatacctgcaagaatgtcattgcgctgccattctccaaattgcagttcgcgcttagctggataacgccacggaatgatgtcgtcgtgcacaacaatggtgacttctacagcgcggagaatctcgctctctccaggggaagccgaagtttccaaaaggtcgttgatcaaagctcgccgcgttgtttcatcaagccttacggtcaccgtaaccagcaaatcaatatcactgtgtggcttcaggccgccatccactgcggagccgtacaaatgtacggccagcaacgtcggttcgagatggcgctcgatgacgccaactacctctgatagttgagtcgatacttcggcgatcaccgcttccctcatactcttcctttttcaatattattgaagcatttatcagggttattgtctcatgagcggatacatatttgaatgtatttagaaaaataaacaaatagctagctcactcggtcgctacgctccgggcgtgagactgcggcgggcgctgcggacacatacaaagttacccacagattccgtggataagcaggggactaacatgtgaggcaaaacagcagggccgcgccggtggcgtttttccataggctccgccctcctgccagagttcacataaacagacgcttttccggtgcatctgtgggagccgtgaggctcaaccatgaatctgacagtacgggcgaaacccgacaggacttaaagatccccaccgtttccggcgggtcgctccctcttgcgctctcctgttccgaccctgccgtttaccggatacctgttccgcctttctcccttacgggaagtgtggcgctttctcatagctcacacactggtatctcggctcggtgtaggtcgttcgctccaagctgggctgtaagcaagaactccccgttcagcccgactgctgcgccttatccggtaactgttcacttgagtccaacccggaaaagcacggtaaaacgccactggcagcagccattggtaactgggagttcgcagaggatttgtttagctaaacacgcggttgctcttgaagtgtgcgccaaagtccggctacactggaaggacagatttggttgctgtgctctgcgaaagccagttaccacggttaagcagttccccaactgacttaaccttcgatcaaaccacctccccaggtggttttttcgtttacagggcaaaagattacgcgcagaaaaaaaggatctcaagaagatcctttgatc

SEQ ID NO: 1768 - DNA, 690 bp, Vibrio cholerae
  source 1..690: mol_type = genomic DNA
atgtctgctctaccttctccttctactaccaccctgattgcacttgaaagtgcatttgttactcctgctcgaaacttaactaagtcgcgtgggaaaaacatacaccgttacgtcagtgctaagatgggaaaaagagttacagtagaatcttttttagaatgtgttgcttgttatcattttgattttgagcccagcatcgttcgcttttgttctcagccgataagattttcatacggtctaaatggtaagacccatacttatgttccagactttctagttcaatttgataccggtgaatttaagttgtacgaagtaaagtccgatatggaaagctcaaaagaggaatttcaatgtgaatgggaagcaaaagttcaaggtgcgtttgagttaggtttggagctagagctggttacagaggaagaaatactggatgaggtcatatttagcaaccttaagcttttgcatcgatatgcttcaagagataacttgaatcactttcatcaaactctccttgccacctttaaattgaatggtacccaaaccgcaaagagtttaggacaccatcttggcctaaatggaagaaaaatattaccgttcctgtgtgatttgctctcacgaaacttactccaaacaagcttagagacgcctctgtcactcgagtctgaatttgaattgggttgttatgcctaa

SEQ ID NO: 1769 - DNA, 1812 bp, Vibrio cholerae
  source 1..1812: mol_type = genomic DNA
atgcctaataaatcattttcgagttttcatcggaagtcagcatttcagcaagaaaaacttgagccgaatgatagggttgttgatgacaacgatgtcgacgaagcaacatatcaagatatatccgcatttcctgacaatatagccactcagattacttttcgtctaagtatccttcgttatttagcaagtaagtgcgaacgaatcattccaaagactatcgaaccgcatcgagtcggactacaacgtttacacgacaggaagattccaagtgcgatatcaatataccggtggtggttagttttcagagcgtctggttgtaacccagttagcttagctcccaagaataaaaataagggtaacagtaaagccaaagtaccaacattcgttgatgctttgatggaacaagctgtagacagagttatctctgggagaaaagtgcgtataagaagtgcctacaggcgcgtgcgaaggaaattacgtcagcataatctgaacaatggaacgaagtacaaatacccaacttatgaatctcttcggaaacgggttaaaaagaagactcctttcgaattactggctgcgaagaagggcgagcgagtcgcgaaaagagagttccgtcggatgggaaaaaagatattgacttcttacgtccttgaaagggttgaaatagatcatacggtagtggatctctttgctgtacatgaagaacatcgcgtgccattgggccgaccttggcttactcaattagttgattgttacagcaaagcagttattggtttttacctagggtttgaaccaccgagctacgtatctgtgtcacttgctcttaaaaatgcaatactgcggaaagatgaccttttgagctcgttcgactcagtagaaaatgaatggctatgttacggtatccctgacttactcgtaactgataatggtaaagagtttttgtctaaagcttttgataaagcatgtgaatcactgttgatcaatgtacatcaaaacagagtcgaaacgcccgacgataaaccgcatgttgaacgcagctacggaactatcaatacttctctgctagacgatttaccagggaaagcttttagccaataccttcagagagaaggttatgattcagtgggcgaagctactcttacattggatgaaattaaagaaatttacttaatttggttagtcgatatttatcatccaaaatctaaccagagaggtactaattgtccgaatgtagcatggaaaaggggatgtcaagaatgggagcctgaagagtttaatggatctaaagatgagttggactttaaattcgctattgttgatcaaaaacaactaaccaaagctggtgtaactgtttataaagaactgacatacagtagtgaacgtttagctgagtataggggtaagaaaggaaatcataaagttcagttcaaatataatccggagtgtatggcggtcatttgggtgttagatgaagacctgaacgagtacttcacggttcacgcgatagactacgaatatgcaagtagagtgtctctctggcaacataaatacaatatgaagtatcaagcagagttaaattcagcagaatatgacgaagacaaggaaattgatgcagagataaaaattgaagaaatcgctgaccgttcaattgttaagactaagaaaatcagagcccggaggcgtggagctagacatcaagagaatagcgcaagagcaaaatccatcagcgatgccaagcctgtcccatcccagaaacatgaagacgaaattgtaattgttgataatgaagattgggatattgattatgtttaa

SEQ ID NO: 1770 - DNA, 990 bp, Vibrio cholerae
  source 1..990: mol_type = genomic DNA
atgaatgaaactcgagaagcacgcatctcaaaagctaaaagagcatttgtatccacgccgagtgttacgaaaatcttatgctacatggatagatgtagagatttatcagacttcgattctgagcctacttgcatgatggtctatggtgcttcgggcgtcggtaaaacgaccattatcaaaaaatatttaaatcaaaacaggcgagattctgaagttgggggcgatataattccagtcttgcatatagagctgccggacaatgcgaaaccggtagatgctgcgagggagttgctggttgaaatgggggatccgctagcgctttatgaaacagatttagccagattgacgaaaaaactgattgatttaatcccggtggttggtgtgaagttgattattatcgatgagttccagcatttagtagaagaaaggtcaaatcgggttctcacgcaagtaggtaactggctaaaaatgatactcaacaaaacgaaatgtccaatcgttcttttcggcatgccatattcaaaggttgtactacaagctaactcgcaacttcatggacgattttccattcagttcgaactgagacccttcagttaccagggaggtgaaggcgtattcaaaacttttttggagtacctcgataaagctttaccttttgaaaagcaggctggcttagctaacgaaagtttgcagaaaaaattgtatgcattctctcaaggaaacatgcgctcattgagaaacctcatttatcaagcatctattgaagcaattgataatcagcatgcgacgatcaccgaagaagattttgtttttgcatcgaagttgacctcgggtgataaacctattacctggaaaaatccttttgatgagggtgttaaagtgacggaagatatgttgcggccgccaccaaaggatattgggtgggaggattattatcataacgttaaacccaaaaaccaaagacgcaagggtagtaatatgtttgaataa

SEQ ID NO: 1771 - DNA, 1194 bp, Vibrio cholerae
  source 1..1194: mol_type = genomic DNA
atgaagacgatgttactgcaacgaccaaagccattcgaagatgaaagtcttgagagctatttaatccgaatagcaaacagaaatggttatcaagatgttgatcgttttttgtctgcacttaaacactatttgtgtgatggggattctgaaaaattttcctcattccccactgatatccgtcgaataaacccatattcctcaaaacatagttcagctgctagaagtcatgctcttcataagataggtcaattaacatttacggaatccgttgatttactgaagttagccatcaatcgttcgccacttaaatattccccctcagtaacagcagttatccgtggtcacgaggttttccctcgctctttactaaggaccaatatcataccggtatgccctgtttgccttcaggaaaatggttacgccagctatttatggcattttgaaggttatgactactgccatattcacgatctcgctctaacgtataactgtcaatgtggcaaaccttgcgactaccgagtaagcggtttacaactagtttgcagctcatgtggaacgacactaactcatttattagaaaagccaactgataggtcatccgatatttctcactggctagcaggcgaaaccataaaatggttaccagcagttcccgtaagttatcgttgggggctagttcattggtggatgaataataaaaaatcaaaagaactggaaacagagagcttcacgattttttggaaaaattggcccaattcctttcataacctaattcaagaaactcttagttacaatcagacctactcactggtagcacccacccaatggagacttaaagacttactaggggaaatactttttagctcaataaacttgccaggtcgaaatctacaatacaacttgatactgagagagcttttccattatctagaaaatcatttgtgggaaaacaatggattaattgcaaacctaagactaagcgcctttgaggtttctctaattttaggctgcagcactgaagaagtagcgtctatgtcagaacaaggattgttgattcccatacaaaaccggaaacgttatgaacctatgagtctaacaaactgcatttttcattttggtgacgtcttctgcatttggttagctgaatttcagacagatgaattcaaccgttcattttatacctcacgatggtga

SEQ ID NO: 1772 - DNA, 1971 bp, Vibrio cholerae
  source 1..1971: mol_type = genomic DNA
atgaattcaaccgttcattttatacctcacgatggtgataaaatgactttagatgagctattggcaactactaaatatgaagaattagtatcttcaactaaacggtcatttcgtccattatccccactgattgatatcactaacaatccgatgacggcattgactatcttagtcaatctgacagagaaagggatatccaacaaaaatcttcttgataaagagcgttgtaaagaaaaactgagggatgacaaatggtgggctgcagtcttaaaaccagcccaataccgtcacagccataatgttaaatttcctgatattcgttctacaggcacaattcgaacagtagcacctgataaccttccggcttatttcatcacgtcgagcaaactgcctaacgtaggatggacttactcaaaggattcctctgatatcaatcgctgtctgttttttacctctgaatttttatgggctggacaaccatgctgtttagccagagcgttaacggatagtgaacacccactttggagtacactcaaaaaacttgggtgttatgagaaaaataaaaaactggcagcaaagctgctttctcaaatccccggcgaactcattgatgttgatttaaccggtaattacctcagccaagtttcttttccggatggtcgggatagttatctgtctttctctcccgtcgcatctcaagctatgcaaagttgtgtttatcaatcactagaacagcattatcgacaaacggcccttatgcgatttgaccgagcaaccaatatggggctactttcagccagttgtggtggccgatttcgcctgattgaaacgaaaccctacatcaaagataaacgacaccactatatttcagaactaccaaactggctcaccaaagaagctattcaatcagtagagcagtttctaagatcagaacaatggctagttacccataatgataagccacgtaatatggcgatagtaaaatcttccattcgttctatggtgaatcgctggttaagctctcgtacaaatacagaagccctgtctccggctgagttagcggaacaacttaataacgacatagcttccaaacgtattataaaaagatacgcttaccaacctaagttgactcggttattcatacaacttatagaaaatactggagaagataacgcttacaaagaagatagaaaaccgacaacgaatagtcagtaccttttgatccctgaactcagaatctctggaggttctgccataagttcatcggtcagtgtaggactattttcaatgatgtcgctttatggatttatccatgcgttcgaacggaatatgcagcttgtactgacgagttttaccattgatagttttgccatatgcgtccatgactatcacttggaaaaacgagggttaaccaaagagccgattaaaaaggcaaaagtacgcaaagatgaacaagaaaaaatagcacctcctgctatctatgatgattatcaattcgatagttgtatcagtctaattatcaaaacatcagaatcaaaaactatacccgctgaaaaaatggtggcattacttccaaaacgctttgcgaggggcgcaatccgattgtccattgatggcattcaagaaataggagcgtttcccaagccattacccgcaatacaggcaataaaaaatccacttggtagttggctgtcgtttgaacctgacttgtctttaatatcaactgattcaatagtcgatatagctaccaatcacaataatttatggttgacagtgatgggataccagtatttagaaccacccacaacaaaacctagttcgctacgagactaccctcatgcccttgtcgaaaatatcttgggatttgttaagcctagaaccgtaacaaaatcgaccaatttagatgatctattttggcgctatcaaatccaaccatttggcgtctgcttactaccaaggagtatcaagtga

SEQ ID NO: 1773 - DNA, 1038 bp, Vibrio cholerae
  source 1..1038: mol_type = genomic DNA
gtgaagcttcctatccatctagcctatgaacgctcaatttccccttcagatgttgcctttttagtcatttggccagatggatacaaagagccactgccttgttacagtcgcacaatccttggccttaacgaaggttcacacgttggctatgatggttctggcgccgtacgaaataacttaaaaatgaatacgctggtcgacggcaatattcatgagttggactattgttctgtgccatatggagcgaaatcaatagagtgttgtttctccgtttccttttcttctgaattactcaagccttataaatgttcagatgcaggcgtaaaaaagacacttagagaatttgttagtctatataaccaacacgtagggttagaagaactgataatcaagtacctgactaatattgcactaggcacctggctttggcacaacaccaaacgaagctattgtgtctccatagaaattcggccgtggccttgggaaggtgagacaatcatcattgatgatatacgcaaatatctcaagggcgatagagcgaccaacgacttactcaactggaacaagctgattgaacaagtaaaagaagctttcacagaccctatgggcttatgcatattggaggtaaaagctaacttaatcaaaccctcgatggcgcagctttatcctagccaaatgttcaaagaagcagccaagaaagagaacaaccgtctctatcaatcaaccatcattgatggtatcaaatcacccattatgggctgttacaaaactggggcggctatcgctactatagatacttggtatccggacgccgaggaaccaattcgggttggtcactacggtgtagatcgagaaaacagtactgcatatcgacatcccgatacaggaaaggacttctttagtattttaaagcgaatagacgaattggttgatcgactaaaagatgccaaagagttaagtcaagacgaactcaaagatatgcatttccttatggctaatctaatcaaaggtgggctatttcaggaaaaaggggaatga

SEQ ID NO: 1774 - DNA, 594 bp, Vibrio cholerae
  source 1..594: mol_type = genomic DNA
atgatactttactatcgaacagttacctttttgccaaaaataaaaaataacgaagcattagtgggacactgtctgaaggttcttcatggtgtatgtactaagtacacaatcaacactatcggagtgtcttttcctgagtggggagaagagaccatcggtgacaaaattagttttatctcacccaaccagctcgaactggactttttacttcaacaaacctatttttctgaaatgacagcgcttggatacctaaacatatcgcagtcaaaatcggttcctgaacaatacaatttggctgttttccggcgcaatcaaaaaatcgaccaagcgacaccgaatggacaaagaatcagagccgaacgtttggctaaacgagctatgaatagaggcgattcaccgattcggtttaccccagaagacctcgtattcgaacattatcattctataccgataacaagtacccgtagtggcaaatcattcaggctaaatttgcaatatcaacgactagatacagttccagatggacaatgggcattttcaagttatgggttagcaaatcaagagcttgaaagtagtcctgttcccgtaatttga

SEQ ID NO: 1775 - DNA, 28 bp, Vibrio cholerae
  source 1..28: mol_type = genomic DNA
gtgaactgccgagtaggtagctgataac

SEQ ID NO: 1776 - DNA, 510 bp, Vibrio cholerae
  source 1..510: mol_type = genomic DNA
tgttgatgcaaccataaagtgatatttaataattatttataatcagcaacttaaccacaaaacaaccatatattgatatctcacaaaacaaccataagttgatatttttgtgaatcgagtatttcagcaaaactactgcagtaagaaagttactttcagcaactggcaaaactcatcaaaagaaccacttcaaaattagaaaacatataatcattacagttccgataaccttgcatcagtcacggacactnnnnnnnnnncttagcactgacgtaacggtgtatgtttttcccacgcgacttagttaagtttcgagcaggagtaacaaatgcactttcaagtgcaatcagggtggtagtagaaggagaaggtagagcagacataatattgcctcttcacgattttgtcgtaaacttacataagtctagactatgaagaggcaatatcaagttatggttgcaccaaatatcaatatatggttgtaaatatcactttatggttgtttcaaca

SEQ ID NO: 1777 - DNA, 687 bp, Photobacterium iliopiscarium
  source 1..687: mol_type = genomic DNA
atgcaaccttctcctgcaacgacatatcaaacagactctcctcttgagttcgcatttactcaaccagctagaaagttaacaaaatctcgtgggaaaaatatacatcgttacgttagcattaaaatgaatactatcatttcagttgaatcgacattggaattcgatgcctgttttcattttgattttaataaaaatatctctcgattttgctcacaacctattagatatagttatgtcattgatggaattattcgtacttatgttcctgactttttatgcgaattttattgtggtgagatggttctatacgaagttaaggcaccaaatgctgttaattcaaaacgttttactaaagagtttgaggcaaaaagacagtatgcgagaaaactttttgatgtagatcttgaattgattgaagaacacgatattagacatattcctcttcttaaaaacttaaaacgtatgcacagatatgcatctcattctgaattaacttatgagcaaacaactattcttaagtatttgaataaacatggctcaacaaagctagaaacaataattgatcattttagtaatagtaaaaatataattccgatgatttatgatttattgtctaagtacttgataaatactgaccttagagttcttctgaataaccaaactgaattaaagacaacttatgtctag

SEQ ID NO: 1778 - DNA, 1812 bp, Photobacterium iliopiscarium
  source 1..1812: mol_type = genomic DNA
atgtctagaacatcattttctagttttcatggaaccccaacatctgatagcgaaaatgcttccagtaagctcacatttatcgaaaatgatgatttgcaagatttaacatcatttagcaaaaaagctcaaaatgaagctaaactcagattaagtatacttcgaaatatattgaataaaagttcagaaataaacttagttttaattgaacgcttacgggctgatcttcaacaacaaggagagcgatcaataccaagtgcaattactatctatcgatggtggttaacttataaaaaatcaaactttagtattttatctttagtaccaaagactaagcaaaagggaaatagaaacacgaaggtacctaaaacaatatcagtctatattgatcaagctgttgaacaagtaatttctgccaataaaatcaatgttagtacagcttttagacgagtcagaagaaaagtaagacaatataatcttacccataaaacaaagcatacctacccttcatatgaagccataagaaagcgcgtaaaaaaaatcaccccctatgaaaaattagctgcaagcaaaggagatcgaatagcaaaacgagaattccgtcgtatggggaaaaaaatccaaactgagtacttactagaacgagtagaagttgatcatacatggttagatttatttgctgttcatgaagaacatcgagtacctataggtcgtccttatttaactcaactagtagattgtcatagcaaatcagtaattggtttctaccttggctttgaaccaccaagttacatgtctgttgctttagcattaaaaaatgcaatcaaacgcaaagataatctattacaaaactatccatcaattcaaaatgagtggttatgttatggaatccctgacctacttgttacggataatggtaaagagtttttgtctaaagactttactcttgcttgtgacagtttacttataaacattcatcaaaacagagtagaaacacctgataataaaccgcatacagaacggcagtatggaaccactaacactgaattacttaatgatcttcctggtaaaacatttagtaattacttacaaagagagggctacaattccagcgacgaagcctcattaacattaagtgaaatcaaacaaatataccttacatggcttgttgatatttttcatcctagaccaaattcaagagggacaaattgcccaaatagagtatggaaacacgctgaaaaaaattggcctccgaatgaatttcttggtaccgacgaagaacttgatttctattttactaagttagataaacgaatgttaagaaaagaagggattggactagcaacagagcttttttatagcagtgaacgattagcagaataccgaggtaagaaaggtaatcataaagttgcgataaaatataaccgcgaaaatatgggcttcatatgggttcttgatgaagatacagaatcttatttcaaagtccctgctattgattatgaatatgcgagtacagtaactttatggatgcataaaaaaaacctaaaaataaaacaagaactcaatattaccgaacataacttagactctgaaattgatgctgaattaagaattgatgaaattgttgatcaatctattcaaaagaaaaaaacaacaataacaaataaacgtcgtgctgctcgatatcaagaaaacgaacaaatggctgctaatgctcgacaacctaaagaaaaaaaatctgctaataatcaaaagacatctactaaaaatattgaaaaagaagatagtagtggatgggatattgattatgtatag

SEQ ID NO: 1779 - DNA, 987 bp, Photobacterium iliopiscarium
  source 1..987: mol_type = genomic DNA
atggatgacaacattacaagaattaccaaagcaaaaaaagcgtttgtatctacgcctgatgtagctgctatcataaacaatatagatcgatgcagaaggctctctaaatttggggcagaaccatcgtgtatgatggtatatggcgcatctggcgttggaaaaacctcaattataagaaaatacctaaaagcgaatgataaagactcaacagcacgacaagatattgtccctgttgtttatatcgaattaccagagaatgcaaaacctgtagatgccgctcgtgaactcctgctctaccttgaagatcccttagctctttatgaatcagacttagctattttaacaaaacgaatagtagatttagtaccaacaatgaaaatagagcttattatcattgatgaatttcaacacttagtagaaaaatcttcaaatagaatactctcaagagttggtgactggttaaagatgttaataaataagacaaaatgtcctgtcattctttttggtatgccctattcaaaagtagtcttggcagcaaacagtcagctgagaagccgcttttcgatacagtttgaattaaaaccatttagttatatcaataattatggcatttatgctggttttctcagacgtttagatgaagccttaccttttgatcaattatcaaaccttgcatcagaacctatagcaaaaaaaatctatgcattttcgcaaggaaatatgcgttcacttcgaaatttagtctttcatgctgcggtaaatgcaattgaaaacgacaataactgcatcagtaaaaacgactgggaatttgcctctaatttgacatctggcaataaactctcaacatggaaaaacccttttgctcaaggcgtcaagatcacagatagaatgttgcaagaccaacctaatgacttaggttgggaagattatatgcgcaacaatagaggaaaaagaaaacctttcgatgagagtaagatctttagctaa

SEQ ID NO: 1780 - DNA, 1179 bp, Photobacterium iliopiscarium
  source 1..1179: mol_type = genomic DNA
atgtttctacaaagaccagagccatattcagatgaaagtttagaaagttttttcatcagagttgcgaacaaaaatggctatgaagatatccatcggttcctcattgtaacaaaaaagtatttacaagatgaaaaccacgatagatttaaggctttccctactgatattaaaacaatcaatccttactcgtctaaaaacaatcatggttcaagagtagcagcactgcacaaaatagcccttatgacttttaatgagcaacctgagatactgtctttagcaataaataggacatctctaatatattcgccatcaacaaccgctctagtacgtggtagtgaggttattcctcgctcattattacgaaaaaacattattccatgttgcccaagatgtttacatgaggaaggttttggacattatttatggcatttcaacggttataattactgccacaaacataatactccattaatatataagtgcgcatgtggcgcagattatgattatcgaatagcaggcttaaatggattttgcagagaatgtgatacgtaccttaatccaaaccaacaacatccagatagtgccgaaagcaaaacttccgcttggctttcaggcaagactatcgagcaactgcctgacttgccccagagctatcgttggggtctaattcattggtggactcaccttactcaaaaagagtttgatggtgcttcctttattgacttttggcatcgttggcctgaatcctttcatcatttaatacaacaaaaaattgaatttaatttagagcattcaattattcatcatgataatttgaagctaaaagatctactgggagatttgttctttaactgtattcgattacctgaaaggaatttaaagtacaacattgtgcttaatgagttattgagatttatagatgataatttatggggtaacaatggacggcttgcaaatctaaaaatgaatgctgtagaagtctctattttcctcaattgctcgtgcgatcaaattgtattaatggtcgaacaacggtttttaaaacccagccggaaagctaaaccaaataaaccattaagttttactgattacttgtttcacctaggagatgtttattgcctttggttagctgaatttcaaaccgatgagtttaatcgaacatttatcatttcgaggtag

SEQ ID NO: 1781 - DNA, 1911 bp, Photobacterium iliopiscarium
  source 1..1911: mol_type = genomic DNA
atgagtacactagctaaaattattaattcatcgtcatcagatataaatgttgaactcaaaagagcttttcgcccactgagtccaaatattgatatcaccgacaacgaagatatcgctctcatcattttaacgaacctagccgcaaaagtagacgcaaaaaaaaatttgaccgatagagaaaactgtaaaaaaaaattaaaagataacaactggtggtcacgttgtattaatacaatgaaatttcgacaaagccacaatgttaaatttcccgagataaaagcaaccggaataattagagctcacccaatgggtgaaatacccaagtacttactatcttcttcaaaattaaaacaaaaaactttggcttatgcgaatgattcaaaggatgtcagtgtcgctaattttttaatcagtgaatttatcttgcacggcaaaatttgttgcttgggcgtcttgcttacagatgagcagcatcctctctgggatcgtttaacaaaactgggctgttatcaaaaaacacgcaagtacgtagcaaaacaacttaaaaaaattccaaattcttgtattgaagtacagctaggtgctaattctgttcgacagatttcattacctgacgggaataactcttacttatctctatcccctgttacctctcaaacaatgcagagttcatgctatcagtctcttcataaacactattggttaagtaaaattacccgttatagcagagcttcaaatatgggtgtacttccgatgacctgcggtggaacattacgcatgttaagtcatactataagctttgaagatgtcaaacattgccaaatatcgcccaactcatcttggttaactaaagattcaatacaagctttctacgactattttgattcttcaaactggatgatgcctcacattcaaaagcaacaaaagttaaaaatactaaaaatcacaatcacagaaatgatatctcgttggttagcattacaaaaaaacacaatacaacataatcagttagagcttgtacataaactaaatttcgatctatcaaatacaaaatccttaagacaatttgcctacgatccaaaaacaactagatttctatttaccttaattgaaaatagatcaaacacacagcaacctaatgagaactttgataatcaatatcttcttttgcctcaaatttctgtttgtggtgcatctgctatgagttcatccatcactattggaataccctctttaaccgcattttatggctttattcatgcatttgagcgaaacatgcaaaaggtcttttcaaacctaaaagtcgattcatttgctatctgcattcatacttttcacttacaaaaaagagggatgactagggaaagtataataaaattgacaagtaatatatcttcccctgcaactcatgatgaatggcattgtgatctgaaatttagtctggctctcaaagtaaataatcttactcacctcaaccaaagcgaaatattgtatgcattgccaaaacgacttgctggaggctacgcaagaataaatatagatgacataaagacgattcaagtatcttctagctttaaggatttggttaaacaaatacccacttttcaaggacaatggctatccttatacaaggcgaaaattgattcctttgaaagcattattcaacaaataaaagcatcgcaaaatataatcccaacttgtgttggatatcattacctagaaaagccgacagaacgcacttttgccctaagagactacaaacatgcgtttgctgagcctatcattggtctcatcaaaccaataactattaaagaagatacaagtttgcatgatttgttttgggaccaaattaacaagccacactacaccacaatagagacaaggaatatgaataatgaagctccctattag

SEQ ID NO: 1782 - DNA, 1050 bp, Photobacterium iliopiscarium
  source 1..1050: mol_type = genomic DNA
atgaagctccctattagtcttgcttatgaacgatcaatccatcccagcgatgtttgcttttttaccatttggccagatggaaataaagcccctttatcttttatgagccgaacagtacttggtcaaatggaaaccgcatcactcgcttacgatactaaaggaaaccctaaacaaacggctactcctgaagttcttgcacaaggaaaccctcatcatatggatttctgtagcgttccctttggcgcagagcatattgaatgcgttttttcagtttcattctcttcagagcttcgcaaaccttacaagtgtagcgagcctgaggttaaaaacactttgattgagctggtcaaattatatgagtcaaaaatcggttgggatgaactcgcaggtcggtttctaaccaatatttgtcaaggaaaatggttgtggaaaaacacgaaaaaaacgtaccaactaaatattgaaattaaaccttggccttggaaaaataaccccgtcattttcgaagatattagaacaaattacagtacttataatgactgccaatctgataccaaatggcaagaattaaaacaactcatcatcaatgctttctcctcaaaaaatggcctcgctattttcgagataaaagcacaattaactctaccaacaaatgctgagctttacccaagccaagcatttattgaaaaagataagaaagaaaaaaaacatcaatctagccgtatatttcaacatacatcaatcaatggacaaaaaagccctatcataggctgctataaagcaggagctggcatttttatgattgatgattggtaccctaatgcagaagaacctattcgtatagggagattcggtgtacaccaacaagatgtaacttgctatcgccccccttcaactcatcaagatctcttttctttattggagcagtctgaaaaatatatagctttattaaaaaatagaaaaaaaacacctcaaaaaacaataaatgaactgcactttttaatggctaaccttatcaaaggcgggttgttccagcataaaggagaataa

SEQ ID NO: 1783 - DNA, 600 bp, Photobacterium iliopiscarium
  source 1..600: mol_type = genomic DNA
atggattggtactataaaacgattcgatttattccgactaattgcaataatgaatttctagcagctaagtgtatcaatatattacacggttttagctaccgttatgatactcactctattggtatttcttttccaaactggtgtaatgagaccgtaggagatcggatttcatttgtaagcatcgaaaaaatggcattagattacctactcactcaaaattactttaaagaaatgcaagatcttggttacttcgatatatcaaaaacattgattgttccaattgaatgtaactttgcatgttttaagcgttatcaaaagatcgacaaatcgtcagcggctggttttcatcgaaagataaagaggcttgctaaaagagcgcataatagaggtgaggtttttgataacaagaagtataacatttacaaacaatgcgatattggacactatcattcattagcagaagaaagtaaaagtaaagggtatggatttagattaaacattcaaagaactaatgaaatcagcatcaataatatacctatttttagtagctatggattagcaaacacagcacacgcattacaatctgttcccataatttaa

SEQ ID NO: 1784 - DNA, 28 bp, Photobacterium iliopiscarium
  source 1..28: mol_type = genomic DNA
gtgtactgccgagtaggcaactgataac

SEQ ID NO: 1785 - DNA, 510 bp, Photobacterium iliopiscarium
  source 1..510: mol_type = genomic DNA
tgttgatacaaccataacttgatattcaatatttttatataaatcaatttcttaataaaaatacaaccatatgttgatattattcaaaacaaccataagttgatattttcataggtttattactaattatgaagattgattgtaagaaagttacttacatcttttttactgtttaagtatatttatggcattagtattgaatattgtaagattctcgctgtggttgaaacaattctgatactagggggatnnnnnnnnnntttaatgctaacgtaacgatgtatatttttcccacgagattttgttaactttctagctggttgagtaaatgcgaactcaagaggagagtctgtttgatatgtcgttgcaggagaaggttgcataaaattgcctctttcaccatatgtagtaaacttacataagtatggtctaaaaagaggcaatatcaagttatggttgtattaaatatcagcttatggttgtaaatatcaacttatggttgtttcaaca

SEQ ID NO: 1786 - DNA, 630 bp, Pseudoalteromonas sp.
  source 1..630: mol_type = genomic DNA
atgtacagaagaaaactcaaacactcccgtgttaaaaaccttcataaatttgctagtcaaaaaaataaatctacctgtttagttgaatcctctttagagtttgatgcctgttttcattttgaattttcaccatcaatagccgcatttgaggcacaaccactaggttatgaatatgagtttgataaccgtatttgccgttacacacctgactttttacttacccacacagacggcacgcaaaaatttatagaagtaaaaccgcaaagcaaaattgctgacgaagactttcgtgcacgttttattgaaaagcaaaccatcgctaagcaagatggacgcgacttaatactggttactgataaacaaatccgtgtatacccaacactcaataacttaaagcttttacatcgctattctggttttcagtctttaacagagctgcaagcatcggtgttagaacttgttaagcaatacggctctattaaagtgggccagttagttaactttttaaaagtaactgccggtgagctacttgctactgtgctacgcttattatcactagggcagttatttgccgacttaactacaaatgaaatatcaatagaaacagcaatttggtctaacaatgtttaa

SEQ ID NO: 1787 - DNA, 1824 bp, Pseudoalteromonas sp.
  source 1..1824: mol_type = genomic DNA
atgtttaatgacggtttgtttgatgatgagtttaaccagccattaccaaaagtagaaaccaaactacctcaaaattacgccaaagatttacaagcccttcctgaaaaaattaaaaatacaacatttgctaagcttaaatatattcaatggcttgaggctaatattcaaggtggttggacacaaaaaaaccttgagcctttattgaaagtaatgcctgaagttgagggtgaaaaaaagcctagctggagaacagctgcacgatggtatagcgcttatacaaatgcagataaaaatatcatggcgctaataccaagccatcaaaaaaagggtaacagggagcgcgatacagccaccgataagttttttgaaaaagcacttgagcgttacttagtaaaagaaaagccatcagtggcttctgcttacaagtattacgcagacttagttatcattgaaaacgacagcgttgtgggcagtgttttaaagcctttaacatacaaagcgtttaaaaatagaatcgataatttaccgcaatacgacgtgatggtttctcgctatggtaagcgtcttgctgatattgcttttaataaagtagaagggcatacacggcctacccgagtactcgaaaaagttgaaattgaccatacaccgcttgatcttattttattagatgatgagctacatatcccgcttggtaggccaacacttaccatgttagtcgatgtgtatagccattgtattgttggcttctactttagcttcagcgagcctagctatgatgcagtaaggcgagcaatgctaaatgcaatgaaacctaaaagtgatgtggcaaaactatacccagatacgataaatgagtggaaatgtgctggcaaaattgaaactctcgttgttgataatggcgctgaattttggagtaacagccttgaacttgcttgtgaagaaattggtattaatactcaatataaccctgttgcaaagccgtggttaaaaccctttgtagaacgtatgtttggcacaattaacactgaattattagaccctgttcctggtaaaaccttttctaacattttacaaaagcatgaatacaatcccaaaaaagatgcaatcatgcgctttacaacctttatgcagctattccataaatgggtagtagacgtttaccatcaagatgccgatagccgctttaagtacatacctagccaactatgggagcaaggctttaatacgttaccgccaacagtgctgagtaatgctgatcttcaacaattggatgttgtgctcagtatttcaaaccatagggtgcttcgtaaaggtggaatacggctagaaaacttaagctacgacagtactgaactagccaactatagaaaacagtttagccataaagtatctcaagaagttttaattaaattaaaccccgatgatatttcttatatatatgtttacctcgataagctagagcattacataaaagtgccatgcatagatccaaacggttacacccaaaatttaagtttgaatcagcataaaataaatatacgtattcatcgcgattttatttcgggctctatcgataatgtaggcttagcaaaagcgcgtatgtttattcataataaaattcaaaacgagtttgaagagttaaaaaatgcaccaaaacactcaaaagtaaaagggggtaaagcattagctaagcatcaaaatgtaagtagtgactcacaaaaatcaatagctcagagcgagccattagaacccaaaaaggttacacctaaagagcaaccaacagatagctgggatgactttatttcagacctagatggattttaa

SEQ ID NO: 1788 - DNA, 1002 bp, Pseudoalteromonas sp.
  source 1..1002: mol_type = genomic DNA
atgctgaccgataaacaaaaagcaaagcttaatgaatttcgcgatgtatttattgaatacccaataataactactgtatttaacgactttgacagattaagacttggtaaaggattagcgggcgaaaagccctgcatgctgttaaatggcgatacaggcacaggtaaaacagcactaataaaacagtataaagaacgccatttaccgcaatttattaatggagtgatgaaccaccctgtattagtaagccgcatacctagtaatccgacactagaatctactttagccgagcttcttaaagacttagggcaagtaggtagtacagagcgcaagctgagaataaacggtacgcggttaacgacatcattaataaaatgcctaaaaacgtgtggcacagagcttataattattgatgagtttcaagagctgattgagcacaaccaaggtaaaaagcgccgcgagattgctaatcgattaaaatacattaacgatgaagcgggtgtatcaattgtattggtgggtatgccgtgggcagaaaaaatagcagacgaaccccagtggtcatcgcgtttattagtaaggcggcagctgccttattttaaattatcagaaaacccaaagcattttgtacagttaataattggcctagctaaccgtatgccattcaccgaaaagccaaaattaagtgagcaagcaacagtatttgctttgttctcattgtcaaaaggctgttttagaactcttaaatactttttagatgatgccgtactttatgcattaatggataacgcgaaaaccctcacaaccaagcatctagttaaagcatttggagtactgtttcctgatgtaccaaacctatttaccttgcccgttgcagaaattacagcaagtgaagttgagcgctattcactttataaacttgaaagcgcccaagatgaagatccgtttatagcgactaagtttactgaccaaatgccgattagtcagttgttgaggaagtaa

SEQ ID NO: 1789 - DNA, 1176 bp, Pseudoalteromonas sp.
  source 1..1176: mol_type = genomic DNA
atgcattttttagttcaaacaaaactttatcctgatgaggctcttgaaagctatttgctaaggcttgctagggataactcatacgatggctatagtgagcttgctgatattttatggcaatggcttgtagagcaagatcatgatcttgaaggtgcgttgccgttagagctgggtaaagttgatgtttatcatgctaggcaagcgagtagctttagaataagagcgcttaagttggtagctcaattagctgatgtaaacgctggtaatattcttgcgcttgcatggcggcgcagtaattttaaatttggcaacttagtagcagtaagccgtaatgagcagacaattcctcttgagttacttcgcactgataatatacctgtttgcattgaatgcttgtttgaatcttcttacgttccttttcattggcatttaaagccctataagacgtgccataagcataaatcacaattaactacacattgtaaggaatgccataacttaattgattacagagcttctgaggagtttttagagtgcagttgtggttgtaaactaaccaatagtgaacagttaaacgatgcagactttaaaattgcatttgcgcttgcaagtagtaacagccataaaatagtggggttaatatcttggtttgcgaaggttaagcaacttgatgtaagcgatgctgactttaaccgtacttttgttgattactttagtacttggcctgaaagccttactactgaattagatttactcacaaacaatgcgcgcctcaagcaacttaacccttttaataaaactaagttcaactctgtttatggaaatgtgatccgtgatggtcaaatagctgcaacaagtaaccgtaaaaacaaagtacttgatgaactaattaaatattttgttgaattagttgatagtaatcctaaaactaaacatccaaatattgcagatttactgctttgtacttttgataccgcagtattattaaacaccaccacagagcaagtttataggcttcatcaagaaggctttttaaactgcgcttacccacaaaaaaagcacgaacagctcagagctgatagtcatgttttttatttacgccaagtgattgagctacagcaagcattcgcagctgaaacgcctcaaacaaaaaaacaatttatagcgccgtggtaa

SEQ ID NO: 1790 - DNA, 2052 bp, Pseudoalteromonas sp.
  source 1..2052: mol_type = genomic DNA
atgaacttacaagatgcatttgcaattgaatcattaaaagaaaaaaccacagcacttagaaagttgtttactccatatatgtctcatgttgcggtagatggctttgaagaacaagcgctgactgtgctcattaacctagtttataaacgaagtgagattgatgatttaacaagtacaagaaccgctaaaagtgtattacgtgatgaagtgttactgagtaaatgtattaacgaagttaaatggtttcatactcataatttaaaatatcctgatatacgcgtaagccatcaacgtttaattagtaaggtagtaagtgaagatattgcgggtatttgtagccggtcattacctttaagttttggatggtcgcacaacagtgctgaaattaatcatgcaaagttatttttaacctcatttacttggcaaggtgaagtaacttgtttagcaaatttactaataaatgaagagcctgtttggattaatttaataaggacatacgggtttactaaaaaggcggttttaggcatcgcgggtaaaataaaacagcttttgccagtggcagagctcccattagaagtaagctctttttcaccacaattacaaatgccatttcagcaaagctaccttgcggttacgcctgtagtaagtcacgcaatgctagctaaaattcagcaattaacaacagatcgtaagttaaattttggtttagttgagcactcaagacctgccaatgttggcgatttagcaagctcagtaggtggtaatattagagtgctgcgttactttcctaaaacatattcaaaggctgttaactgctctgaagtattcaataatgatagtgagaaagcatttaaaattcgtgcgctattaaacagtcaatttcaacaggcgcttttggtattggtcggtattaaacagtttaatacgttaaggcaaaagcgattagcgcgagtagcggctattaggcaagtacgtgttagcttgcagttgtggctggataacattctggaagctaaaaataacgctcaagggcaagcttaccctgagtgggcaaagcattacttagatcagagtattactaactgcattagccaatttagtaacgtactaaatgagagccttggtaatttaagtaagctcaaacgctttgcgtatcaccctaatttaatgggggtgtttaaaacgcagttaaactatgtgtttactcactgtattcctgatgaagaaacattaaatgatgagcaaatagtgtatgtgcattgccaagatatgcgagtgtttgatgctgaggcaatggctaatccgtatattcaaggtatgccgtcacttacagctttaaatgggcttgctcataactttgagcgtaagctaaaaaattttatagacccttcaattaagtgtattggtagtgccattaacattgaaagttatcaactacatacaggtaaaccattacctgaaccaagtaagttaaaacaagttgctggccgtagtcatgtcataagatcaggaattatcgataaacctaaatgcgatataacactcgatttagtctttaggctttttgtaccaaacattaagctgttagataagttaaatagtcagcttgtgaaacccgcactaccatctatgtttgcaggcgggactatgcatccaccttcgttataccaaaatattgactggtgccatttacatactaaaccaagtgagctgtttaaaaatataaaggcaaaatcgttaaatggcagttggttgtacccttcaaaaaaagtagtcaaaagttttgaacaattgattgatgcgcttaacggtaactttaatttaagacctgctgcaattggttttgctgcgcttgaagaacccataaagcgagatgtagccttacatgaataccattgttatgctgagcccgtaattgggcttttagagtgtgttagcaatacatcagttaagtacgcaggggctaagcagttcttccatgacgcattttgggttatggatgttcaaaaagagtctatgcttatgaaaaagtctaagtttgagtatgaataa

SEQ ID NO: 1791 - DNA, 1029 bp, Pseudoalteromonas sp.
  source 1..1029: mol_type = genomic DNA
atgcaattacctcggcacttaagttacacgcgttcgctttcacccagtaaagcggtatttttttataaaacatcggagtctgattttgaaccgctgcaaatagagcaaaataaattagttgggcaaaagtcagggtttggcgatgcgtatcaaaagcaaaatgtggctaaaaatttagcgccacaagatctagcgtttggaaacccacaaacaattgatgtgtgctacgtacctccagcagtaaatgagctattttgccgtttttcactcagggttgaggctaatagcaatgaaccacatgtttgtgatgaccctaaagttatttattggttaaaacggttttttgaaacctacaaaaaacacaatggtcttaatgaagttgcaactcgctatgctaaaaatatactgatggggaactggctttggcgtaaccgccaatcaccaaatgttgatattgaaatccttactgaacatgcagccccgatcattgttgaaggtgcacaaaaactaaaatggcaaggcaattggcaaaacaatcaaacagcattaataacattatcagaagctattcaagaagggcttagcaatcctcaaaattattgttatttagatataaccgcaaaaattaaaaatgcatttagccaagaggttcaccctagtcaaaagtttgtagacaatgttgaacaaggcatgtcatctaaacaacttgcatacactcaagtcggcgataaaaaagcagccagtttaaactcacaaaaagtaggggctgcgattcaaactattgatgattggtatgagggaggttacaaacctttacgcactcacgagtatggtgcagataagcaaatattagttgcacatagaacgcctaagagccattcagacttttattcattacttccgcgcattgccttgcatattaagcacatggaaaagcatggtttagagcaaagtgaagaatcaaacgcagttcactttattgcagcagtgttgatcaaaggcggcttgttccaaaggagtaaagcttga

SEQ ID NO: 1792 - DNA, 600 bp, Pseudoalteromonas sp.
  source 1..600: mol_type = genomic DNA
ttgaagcgctattattttactattacttatttacctaaaaattgtgatgtaagcctccttgcagggcgttgtatcggcatattgcatgggtttatgagttcgcgtgaaattagtaatataggtgtgtgttttcctaaatggaatgagcaagagataggtaatgaattggcgtttgtatcgacagataaaaagcaattaaccaatctatctcagcaaagctattttgagatgatggctcaggataaattatttggcttatcaaaaatactcgaagtaccaacaaaccaaaatgaggttatgtttattcgcaaccaatcagtagctaaggcttttgttggcgaaaagcaaagacgtttaaaacgcgctaaaaaacgagctgaagccagaggtgaagtttataatcctgaatatcaatttgaggcaaaagacataggccattttcattcaatacctgtatcaagcaaagccaacggccaaagttatgttctgcatatacaaaaaattgaaaatactaatgcgacagaaaatcaatttaataattatggctttgctacaaatcaaacatttcaaggtacggttccttctttgaatacccaataa

SEQ ID NO: 1793 - DNA, 28 bp, Pseudoalteromonas sp.
  source 1..28: mol_type = genomic DNA
gtgaactgccgagtaggtagctggaaat

SEQ ID NO: 1794 - DNA, 510 bp, Pseudoalteromonas sp.
  source 1..510: mol_type = genomic DNA
tgttgtttgaagtataagttgacataaccaaactcggttttattaacttacagcgtggtaagtgaagtgtatattggcatagtattgaagcaatagatggcataaagctaccaaatacagctttataaaacgcaaagtaaacatgctacgcgttgtaaatcactcttaaacagtttggaaaatggtttacactggcacaaaaactttgatgaataaatcatcaccttttactttaattggtaagtccattnnnnnnnnnncggctattgatggtgaaaattcaaaatgaaaacaggcatcaaactctaaagaggattcaactaaacaggtagatttatttttttgactagcaaatttatgaaggtttttaacacgggagtgtttgagttttcttctgtacatgtgagtcaaccatctaaccatttggttaaatactagactatgccaccttatacttccaatttatgccatcttttagtacaaatatgtcaacttatacttcaaacaaca

SEQ ID NO: 1795 - DNA, 633 bp, Pseudoalteromonas ruthenica
  source 1..633: mol_type = genomic DNA
atgtatagacgcaatcccaagtcatctagagtcaaacaccaattcaaattcgctagtcaaaagagcaagaacacttgtttcgcagaatcagcattagagttcgatgcttgtttccactttgagtattcctcagcgattgtcgcgttcgagactcagcctcttggctttaagtacgactttgaaggccgtacttgcccatatacacctgattttctattaactcacagcgatggcacgcaaaagtatatcgagataaagccggtaaaagagcttgctaaggatgagtttcggcaacgctttgagcagaagcaattggcatcaaagcaactgggtattgagcttatattggtgacagataagcaaattcgagtatttcctgttttagataatctgaagctattacatcgttactcgggtttccaggtattgactgaattacatacggttgtggtcgggttagtaaaaagtactgggttagtgaaggtcgcgcagcttgtaaattacctaaaggtttctgccggagaagttttatccatcgttgcaaggctgttgtgcatcgggcaattggcaacagatctcactacagatgcactttcattagactctgtaatttgggcctcagatgaacagtaa

SEQ ID NO: 1796 - DNA, 1839 bp, Pseudoalteromonas ruthenica
  source 1..1839: mol_type = genomic DNA
atgaacagtaaaagtctggggttgtttgacgatgaattccaacatccgataccccaagtagaagcaccaaaaagcaccaaagctgaaaaagatctcagtgcctacccgcaagaaatacagcagacaacatatgcacggcttaagtacattcggtggcttaaagagcgtatagttgggggctggactgagaaaaaccttgcgccactcataaacgaaatgcctaaagtcgaaggtgcagataaacctaactggcgtactgcggctcgttggtttaaatcttattctgaatctgatgaatccatttttgctcttattcccaaacaccaaaagaaagggaaaagaacacaaagaacagacacagacaagttctttgaaaaagcacttgaacgatttttggtaaaagaaaggccttctgttagctcagcttatcaatattacaaagacttagtggtaatagagaacgaaaaagtaataggtgaagatttaaggcctttaacgtacaaggcgtttaagaaccgaatagataaattaccacattatgaagtattacgagcccgctatggtaaacgtatcgcagatttagcttacaacaaagtagagagccacaagaggccgacacgagtgttggaaagggtagaggtagatcacactccattagacttaattttattggatgatgagttacaaataccgctaggacggccaaccctaaccattttaattgatgtctatagccattgtattgtcgggttttaccttggtttcaatgatcctagttacgatgcaattcggcgggcgatgctaaacgcaatgaaacccaaaaactggataaaagagcagtatccggatataacccacgattggcattgttgcggaaagattgaaaccctcgtagtagacaatggtgttgaattttggagtaatagttttgagtctgcgtgcgcgcagatcggcattagtttgcaatacaacccagttggcaagccctggcttaaaccatttgtggagcgaatatttggagtaataaatacccagttattggatcctattccaggaaaaaccttttcaaatatgatgaaaaaggagggctatgacccaaataaagacgccatcatgcgctttagcgcgtttatggaagtattccaccactggattatagacgtctatcaccaagaagctgacagccgctttagttacattcccgcccttgagtgggatagggggtacgagcagctcccgccagcgccattatctagtgacgatatccaacgattggaaatcgtgctgggtataagcacttggcggcatatccgtaagggcggtattcattttgaaaatttacgttacgacagtaacgaacttgctgattacagaaagcgctttagccccaaggcttcagtaaaactgatgttgaaggtgaatccggaagacctttctagggtctatgcctttttacctgagttagatcactacattgaagtgctatgtatcgatcctaatggttatacagcgggcttgagtctacaccaacataaggtcaatgttcgcttacagcgtgattttatcggttctcatatggatgttgctgctctcgctagggcgaggatgctaattcacgaaaaaattcaaaatgaagttgagttgttagccaactcgacaaaaaaacctaaagcaaggggcggtaaggcattggccaaatatcaaaatgtcgccagtgacaatcttgtatcggtgaagcctagttcacccactaaaaagccacctgagaaagtagaaacagaggaagcgcagaataaaggtgattgggacgacttcgtgtcagatttagagggcttctga

SEQ ID NO: 1797 - DNA, 1002 bp, Pseudoalteromonas ruthenica
  source 1..1002: mol_type = genomic DNA
atgctctcagagatacaaacgcagcgcctaaatgaatttattgacgtattcattgaatacccattaatgactacaatcctcaatgattttgaacgattaaggacgggtcaaaaacttgccggcgagaagcagtgtatgttgctaacgggtgacacaggctgtgggaaatcttctgtaattaaccactacaagaataaacatccggcatgtcacattgacggtgtttaccatcacccagtattagtttcccgcatccccagccgtccaacgttggaatcaaccatagcgcagctacttagcgaccttggtcaggtaggagctgcaaaaaggaaattaaaacgcaatgatgccaatcttaccgattcattaattactaatttaaaatcgtgtggcactgagctcatcattattaatgaatttcaggaactagtggaatccaaccaagggaaaaagcgcaacgaaattgcaaataggctcaaatacctaaacgaagaggcgggtattccgatcgttttggtaggtatgccatgggccgaacaaatagccgaagagcctcagtggtcctcgagattgatggttagacgctttataccttactttaaactctcaaaagatttaacactgttcgttcgggtattgatgggcttggctacacgtatgccgtttcgtgataagccccgtttgcaagagcaagatattgtctatgccttgtttgcggtatcgaaaggctgtttccgtaccttgaagtattttctgaatgaagctgtaaaacaggctttgatgtacggctcagagacgttaaccaagcagcatctcagcgccgcatttgaagtgttttacccgggtatagaagacccgtttaaactatcggtggatgagataacggcctgtgaggtagagagctactcggtatatcacaccgacagtagctcggataacgaggcgcataatcggacgaggtttacggaaaaaatgcctatcaaccagttgctaaaaaaataa

SEQ ID NO: 1798 - DNA, 1179 bp, Pseudoalteromonas ruthenica
  source 1..1179: mol_type = genomic DNA
atgcactttttagttcaaaccaagccctttagggatgaaaccctagaaagctacttattacgtttaacgcgagataacgcttataccgactaccatgagctggccgatattatttggcagagattggttgagtgtgaccatgagttggaaggggcatttccgctagaactgaagactgccaatctataccacgccagccaatcaagctgttttcgcgtcagggcgttcaagctcgttgcgcagtgggctgctctggagccgcttgaacttattcgcttgtcctggctgcgaagcaatactcagtttgggcatttatcggcgcttattcgcgatcagttgctcattccccgaacgctcctaagagagagtcacatcccggtgtgcctaagttgtttaaaggaagagggctacattccctattattggcatttaaagccctacaaggcctgtcacaagcacaaaatgcaattacagtctcattgtgctgagtgtggcgaactaatcgattacagagcgtctgagcggttctctcagtgcaattgtggtgcaaagctaaagactacagctcctgcaagtgaagcggacatagcggttagtgaagggctcagcggtgcggatgcgcacgatttggtgggtaagttgacatggtttgcttaccagtacggccaagaccaagagcacgctagcttcaatgaagctttcatcgcttatttcaaatattggcctgataactttttcgctgagctcgatgaaaaagcatctagggcacgagaaaaacagctaaggccattcaatcatacaaaatttgatagtgtttttggtgatgtgatcaaagtcagcaaagtagccgggcccaatgtcttaagaacgaatattatcgttgattcattactggagtttttcagtgacctagttgagaagaacccaaaacaaaagcacccaaatatcgcagacttgctggtaaatagttcggatgccgcaactttgatcggtacgaccttggagcaggtgtttaggctataccaagaggggcaattgacttgttgcgagaggttgaacaagaacgaacgtttgcagccagacaggtgtgttttctacttgcgtcaggtagttgaattggcgcaatcacaaggacgctatgtcggtgacttcaaaaatcaacttatcacgccttggtga

SEQ ID NO: 1799 - DNA, 2082 bp, Pseudoalteromonas ruthenica
  source 1..2082: mol_type = genomic DNA
atggacttagctgaagcattggcaatcaaatctgtgcgtgagaaatctgatgcgctgcgaaagctttttgctccatatgcttcatccgttgcggtcgacggatatgagcagcaggtggctaccgtgctaatcaacttggtttacaagcgcaatgaacaaattgatctggcaagcatcaaagcggcgaaagatgtgcttaaagatacagagctaatggcgaagtgtatcagtgaggtgaaatggtttcacacccataacctgaaatatcccgatattcgagtcagtcaccaacgcttgattgcacaagtaatcgataaggatattccagctatcaccagcgcttctttacctaaattgctgggctggtctcacaacagtgccgagatcaatcatgcaaaactgtttttgacctcatttaagtggcagggcgaagtaaataatctagcgggtgttttggttgacgaacatcccgcttggatagaagcgatgagaaacttgggtttaaccaaaaagtccgtaatggcattagctacgcatatccgagagttattacctgccactgacttgccgggcgaggtcagcgagttcacccctcaattgatgatgccctatggaaaagactacctcagtgtttctcctgtgctgagccatgcaatgctggtcagggttcagcaactggctcgggataaagtagtgaattggggagtggttgaacatacacgacctgcaaatgttggtgatttacctagttccttaggtggtaatgtacgcgtgctcaggtattttcctgcaacatcgctaaaaggcagcttaggagaatatatagaaaacgacccgaacgaaagactattcaagcataaggtactaacgagcaaaagctttaaaacgtcacttattattttgactggtaaatcagtttataacaccttgaggcagaaacgattagcgcgtattgctgcgatacgtcaattacgaagtactttgatgcactggttagataaaattatagagtttcaaaataatggtaaccacaatcttgtgccagagcctatgaagtcgttcatagaaaatttgaaaccgaatcttaatggtgtagtttgcgagttaagtggcttgttgaatgagcagttgtcttcccatcactcattgaagaaatttgcataccatcctgacttaatgtcggtattgaaacgccagctgcaatatgtgctaacgcacggggaaacggtagacgagaccttagttgattctcaaattttgtacgttcactgtaaagggcttcgaatatttgatgctgagggaatgccaaatccttatttgcagggcattccgtcgttaaccgcattggcgggagttgcacataaatttcagcgcaagcttcagtctattgttgacccttctatcgagtgtattggttcggctatattcgtacacagctatcaattacataccggcaagccattgcctgagcagaatcagcttaaaactaaccaaggaataacctcggcaaaaagaccggggatagttgataagcccaaatgtgatatgacgattgatttggtatttcggctttttgtgcctcacgagagcactcggactcaattaaccgacaatatgtttaaggcagctttccctacctcttttgctggcggcaccatgcacccgccatcgctgtatgaaaccgtcgagtggtgccaggcattcaccagtccaacccagctttttggagaactgagtttgctgccgtcgagaggttgttggctttatccttcaaaacaccaggtgagaacgttcgaagacatggtggaattactagacgcagatccaaatcaacggcccgctgggttagggtttgcgtcactggaacagccgacccagaggaaagaggcgttaggatctaagcattgttatgttgagcccgcaattggtttattagaatgcgttaacccaattactacacgcatgggaggagcaaaggcattctttcataatgccttctgggtaataggagtcgagaaaacgtctatgcttatgaaaaaagccaagtttgagtacactcaatgcgactcccgcgacacctaa

SEQ ID NO: 1800 - DNA, 1029 bp, Pseudoalteromonas ruthenica
  source 1..1029: mol_type = genomic DNA
atgcgactcccgcgacacctaagttatacgcgttccttgtctccgggcaaggccgtattcttttatcaaactcctgaatccgacttcgaaccattgcagatagagcagaacaagctgattgggcagaaatccggttttaccgatgcatatcaaaagctcggagaacccaaaagccttgcaccccaagatctagcttttgggaatccacagaccatagacgtatgctatgtgccaccgactgtgaatgagattttttgccgtttttctctgcgggtagaggcgaacagtgttgaaccatacgtttgcgatgaccgtaaagtgagctattggctgaagcgctttgtcgagacctacaaggagcatggtggttttaaagaattagcctcacgttatgcgaaaaacatactgatgggaaattggttatggcgtaataagcaatcaccgggctttgatgttgaagtgctcacggaacactcagaaccaatcgtgattgagggtgctcaaaggttaaaatggaatggcgtttggggaaacgatgaggctgcattagcaaccttgaccgaggctattgaaaatggtttggctaatcctcaggcctattgctatttggacattaccagcagaattaaaacggccttttgccaggagatccaccccagtcagaagtttgtagacaatgttgaacaaggaatgtcatccaagcaactagcctacactcaggtggatggtaaacaagttgcaagtttgaatgcgcaaaaagttggcgctgcaattcaaaccatagacgactggtacacagaagatctcaagcgtttgcgtattcacgaatacggtgcagacaagcaggtattagttgcgcatagaacgccaaagaatggtttggatttttactctctacttccaaaggtcgctgtttatatcaggcatatggagagggatggtctggaagatgatgaagagtctaagcacattcactatctggcatcgatcctgttgaaaggtggtttattccaaaggtctaaaggatga

SEQ ID NO: 1801 - DNA, 606 bp, Pseudoalteromonas ruthenica
  source 1..606: mol_type = genomic DNA
atgaagcgcagctatttcacggtcacctatctcccaatcaattgcgattactcgctgcttgctggcaggtgtattggcattttgcatggctatttaagcagatttgaacttgatggaataggtgtgagttttcccaaatggaacgaggagactgtaggtaatcaaatcgcatttgtctccgagagcgagagccatttacagacactacggcagcaaaactactttcagatgatgagccatgacggcctattcaaattatctgtgactagaacagttccagagcaggttgatgaaattcagtttgtgcgcaaccagtccatatccaaagcctttgtcggcgaaagacgcagaagaatggtaagggcaaagctaagagctgaagcccgaggggaagagtacaacccgatttatgaatttgagcccacagaaatagagcattttcactcaataccgatcacaagtaaaagcaataacaatgagtttgtattacatatccagcggcgggaatgttctggtacagcgggtggatttaataaatacggttttgccacaaacgaacatcacctcggtacagtaccgagcctttctggccttttaattagttaa

SEQ ID NO: 1802 - DNA, 26 bp, Pseudoalteromonas ruthenica
  source 1..26: mol_type = genomic DNA
gtgaactgccgagtaggcagctgaaa

SEQ ID NO: 1803 - DNA, 510 bp, Pseudoalteromonas ruthenica
  source 1..510: mol_type = genomic DNA
tgtcgtttgaagtataagttgacataagacgggcccttgccctaggctctatctgggtgttacggaagtataagttgacataagtttgaagtaaaagatgacaaaaagtcccttactgtcctaatattgcccctcgcgcgtaccttttgtgcattttcagtcgttcggctagtgcgtcatacaactaattaaataatcagacgttcacaccaattcatttttggacagaaatgagttagagccgaccagtnnnnnnnnnngacaatcgctgaggaatactcaaagtggaaacaagcatcgaactctaatgctgattctgcgaaacaagtgttcttgctcttttgactagcgaatttgaattggtgtttgactctagatgacttgggattgcgtctatacatagccgtttctttttttagcgcactgactaaaaaataggctatgacaacttattgttcaaatttatgtcaactttaacttcaaatttgtcaacttatacttcaaacaaca

SEQ ID NO: 1804 - DNA, 630 bp, Photobacterium ganghwense
  source 1..630: mol_type = genomic DNA
atgtaccgccgaaagctcaaacattcccgcgtaaaaaatctttttaagttcgtcagtgccaaaatgaatcaggctatgacggttgaatcctacttagagttcgatacctgctttcacctagaatattcatcatccatcatctcttttgcggctcagccggaaggtttcatctatcgtattgatggccgagattgctcttatacgccagattttcaaatacttgaaaatgaagaggtaaagtggattgaagtgaagcctttcgtgaaaactcaacgtccagattttcttcagcgttttaaagtgaaacaagaaaaagccttagcgcttggtgttcctctcattttggtgacagagaaacaaatcagggtgaatcccgtcttgaataatctcaagatactgcaccgttattcgggttttcagtcgcttacagatttacatatccgtcttttgtcattggttaaaacggtcggaaaaataagcgtgagtgatgcagcctgtcggttaggtattgatcaggggatgatggtgaaatcggcttttagcttggtgtcatccggtatgctaacggctgatttagtacatgatgaattgggtttacattccattgtttggagtgaacacaatggctaa

SEQ ID NO: 1805 - DNA, 1868 bp, Photobacterium ganghwense
  source 1..1868: mol_type = genomic DNA
atggctaaagatatcagtaccggactttttcaagatgagatggcagttgcatccagcagtgagccagttgaagcattacccagttcaacggatgattttttcgaacgtgacctcgcttcttatcctgatgaaattcaaatagaagtcagacgtaggattgaataccttcaatggattgaaaagcaccttgtcggaggctggacacaaaaaaacttagacccactgattgaaaaagcagccagagaaatagactttcctcctccaaaatggcgagcattagcgaagtggtggagtgtctattcatcatctgggaaaatgttggcgtcattagtgcctaagctgcatcgtaaaggtaatcgaaatctaaaaataaccaatgaattatcattttttgatcgcgctgttgaacgttatttagtccccgaacgtccttctatttccgctgtttatcagtattacaccgatcttattcgcattgagaatcagcatcttgtcggcgagaaagttcaagccctctcatacaaaggcttctataaccgaataaaaaaatgccagcttatgaggttgcagtagcaagacatggtaaatacctcgctgacatggaattcaacaagatcgatgcgcatcaaccacctagccgagtattggaaaaggttgaaatagaccattcaccattagatcttatcctacttgatgatgagctaaatattccgctaggacgcccttatctgacactactgattgatcagtacagtaaaagcattatgggttttcatttagggtttaaagaacccagctactattcggtaatgaaggccatccttaatgcgataaagcctaaagatgatattgcggagcgatttccaggtgttgtgcatgactggtattgtcagggcaagatggagtcactggttgttgataatggggcggaattttggagtaagagtcttgagcagtcctgccttgaagttggtattcatattcaatataaccccgttcgcaaaccttggttgaagccgttggtggagcgaatttttagaaccatcggcagcaagttgctagtgactattcccggaaagaccttctctaatattttagcgcgtgaagagtatgatccgcgaaaagatgcggtgatgcatttttcagtattcaatgaactgtttcataaatggattattgatgtgtatcactatgaatcggattcccgaaagcgtgcaattccttatgtgaaatggcaggaaggggttgtggtgatgccacccattagttatgagccggaagatctggaaaagctatctgtggttttagggatcaaagaattacgcaaacatcgacggggtggtattcaccttcatgggttacgctatgacagcgaagagttagcggattaccgccgaatgtactcgcgagatatcgacgtactcacgaaaactaaccctgatgatatttcaagcatttatgtctatttagagcataagcagcaatacttgaaagtgccatgcatcgaccctatcggttacacgaagagcctatctctcactcagcatcatattaatcaacgcttgcatcgagatttcattgacagtcaactagacctagaagggttggctcgcgtcagaatgtatattcatgatcggattgaacaagaagcagacgagattaagaaccttaaccgagggaggcctcgacgtactacaaaaggtatggcgagattagctaaacataacggtgttgctagcgatgttcaaaccagttgtgtaccagaaacactaccggaactgtcgatgccagataaagggaaagaatccaaacagttgccggactctgatgaatgggatgatttcatatctgatctggaaccatattga

SEQ ID NO: 1806 - DNA, 1017 bp, Photobacterium ganghwense
  source 1..1017: mol_type = genomic DNA
atggatagtttgtctcctgaagatgaagcgaagtatcaggcgtttgttgatatttttgtcgagcagccgatagccacaatggttatggctgattttgaccgattgagatacaaccgacaatttggtggtgatcagcaatgtatgttactcacgggagatacgggttctgggaagtcttttttaatcaaagagtattgtcggcgtcttgctcaaaccaacccaatgaaacaagcattggtactttcaagtcgcatccccagtaaaccgactcttgaatccacgatcattgaattgctcaaagattttggccattttggtgcgacgtaccgaaaagggaaaagcaaagatcaatccttaaccgtctcattgattaaatgcttaaaggcatcttgcgtagaactcattatcattaatgagtttcaggagttggtagagtttaaaacagggcgagcattgaatgagatagcaacgcgcttgaagcacatcagtgaagaggcgacagtaccaattgtgttggttggcatgccctgggctgcgaagatagccaatgagccgcaatgggcgtcaagactgcttatcaggcgagaattaccatactttaaactctccgaagaaccagaacacttcatccggtttatcaaagggcttgccgccagaatgccttttaccgaactgccaaaactggataacaagcagacgatactggctctgttctctgcctctaacggccagactcggcgtttaaagcaattattaaatgaagccgttaaactggctttagttcagaatgcggtgacgttaaccaatgaacatttagcggatgtcttccgtatgatattccctgccatccctaatccattcttagcgtcgatagagcaaatagaagggcaagaagtgagtttaccctctcattacgacagtggtgcagacaatgaatttgaagccattatcccgactcagtacacagatcgccttcctttatcgcaactattgcgtaaaagtagaaaaactaagtaa

SEQ ID NO: 1807 - DNA, 1218 bp, Photobacterium ganghwense
  source 1..1218: mol_type = genomic DNA
atgtttctcattcatcccgaaaaacactaccaagatgagtcccttgaaagctttttgattcggctttgtgagtgtaatggctttgagtcgtttcggttgttgagtggtgcgctatgggaatggctcgttgataacgaccatcaagcagcaggggcgctttcccgtcagttgtgtgagataaacctttatcatgccaagcattccagtggttttagagtacgagcttttgagctactagattcattgtttaaggggaacgctagaccattgatgcaacatgcgctgttgcattcagccgtaactttttcccccaacttaacgtcagtctttcgggctggtatacatatccctcgctgttttcttcggcaaagttacacgcctgtctgtccggcatgtttaacggaagctccatacattcgccaatattggcacttaaagccttatcagagctgtcatcgtcatggtgttgccatgttgttccattgcccatcatgcagtgccgttctgaattatcaagatactgagcaaatcgagacttgtagttgtgggtttgatcttcgtgatgcagggacaaatgttgcttcatcagagcaaattgcaatcagccagcttgttgttgaaggggaaatgcaaaatgctctctcaattagtcattggttaggcgcactactttggttttatcggtacaagcagtctcagctttctctcaatgtggtcaaagaacctgagtttggccgggcagttgaatatttttcacagtggcccaatgcgtttgtgcgtgatttgcatgagttggctacacaggctgaaatgaaacttgtcagaggatttaatcacacgcgcttttcggaggtatttggcgatctcctgagttcatcacgtaaattgccatcgagcgatactcaacaaaatttcatcctcaaggccgtgatcgattttcttcagcagttggtgcgagataacccgaaagccaaagagacgaatattgctgatgtgaagttgacggtcgtggaggccgcagccctgttaacaacttcgacagaacaagtgtatcggctttatgaagaagggtacttgcaatcatctgtgcgttttaaactgcattcaaagttatcgcctaatgatgcggtgttttttctacggcatgttgtggagttacgtatggctgggatggcatcggattacagtgctaatgatgtttatcttccatcatggtga

SEQ ID NO: 1808 - DNA, 2076 bp, Photobacterium ganghwense
  source 1..2076: mol_type = genomic DNA
atggtgagatcaatgcatttatcggagttactactcgttcaagatacagaagaacgcaatcagttattgagaaaagcacttgcgccttatacatgtctcgttgacgtaacaggctatgaacgccagctattgatgattgctattaatataacggtgccgagaaaagatgtagacgatgttttggataagaagctagccaaatcattgctgaccaatacaaagcaccttcaacgttgtattgatgaagtgcaatggttccatacccacaatgtgaaataccctgattctcgggtaaaggggcaacgcattatctccctgaaacaagatgaggttgacggggttttgtgtagtgccaatcttccttcatcattgggttgggcgcataacagttctcaggttaatcctgctaaatttttctctattcgctttatttggcaaggccgagcaatgtcactgcttgagaccgtgattgatgctccttctgaatggaaggtggcatttcgatctttagggataataaaaaaacagttatcggagttcagggaaatattttcgacctactatacctctagtcagatcccatctgaagtcagtgattattcaacgcaaatacgcgtgccatatcagggctattattgtgctctaacccctgtcatcagtcacagcgttcaatcgaaaatccaaaagatggcatttggccgaaaggtgaaatcgagcaatgtagaacatcatcatcccgcgagtgtgggaagtttggttgctgcgttaggggggaatattcgggtactggattatcctcctaatgttcgtcagaaaacatcagaagctttttcactgtaccgagcggtaagtgaaaaggaggtatttgatcactcgattattaaagagaagcgctttctggatgcattgagtcggattgcgggagagaaccctacaccaacactgaggcagcgacgacaactgcgagtatctgcattacgctttgtacgaaagcagcttgccttatggctagctccgatgatggagtggcgagatagtattggtggggaatctcgtcattctcccattgaaacactagaagaacagttgctttacctgcccattgcacacttaccggatgtccttagcgatttaaacacacgttttcatcaagcattgcaataccatcgtcgaggggcgcgttatgcctaccatccagaggtcttgtttccgattaaacagcaattgaaatggctgcttcgttatatggcaaatcaacaagatgcacttataacgcctgagccaaattgtgtgtacctgcatcttcagcaacttgtggttcatgacgcttcacttctgtctaacccttatgtttcaggaatacctgccttaacagcgttggggggattgatgcataactatcagagaagattgagtgcattgatggagtgtgaatgcttaattcaacgaggtgcttggtttattgcccactatcatcagcagaagatcaagaagcttcccgaaccggataaggtgagatatctgaagaaaagatcagatgttcagcgaccaggtattaccgatggaaaatatggtgacttaaccatgaatttggtgctggaattacagttacccgagtcagtatcaatacctgaactatcccttttacaagccgcgttcccatcgcgttttgcaggcgggacgcttcaccctccatcattgtttgagcaaacagattggttatcggtttactccaaccaaagtgaattgttttctgttttagctcgcttacctcgaagtgggtgttgggtttatcctgatgataaaggtgtgagttcgtttgatgaactggcttctcgtttggataatgaccctgacttaaagcctgttggtctgggttttatcccactggaagagcctcattgccgagtagggagtatcgcgccttaccattgttatgtcgaaccatgcattggtgttgttcggtgtatgaaccccattaacgttaggctctcaggtagccagcaattctatcagtcggctttttggcactttgatattgcaaatgacgctatgcttatgaaaaaggcaacatga

SEQ ID NO: 1809 - DNA, 1035 bp, Photobacterium ganghwense
  source 1..1035: mol_type = genomic DNA
atgcaaatttgccgccacttaaactatgttcgctcattatcaccgggaaaggcggtgttttactatcaaacacccgagtctgattttgtaccgattcaggtagaaacgaaccgaattagagcagcaaaaagtggttttactgaagcgtatgataagaaccaaaatctcaaaaatgttgccccgcaagatctcgcttacagtaatcctcagtgcattgatgcttgttatgtcccgccgaatatttcagagatacattgccgtttttcactcagagtagaagctaactctcttcagcctgatagctgtgaagatcagaaagtaaggcgatatcttattcaattagcatcaatttatgcgcaagtgggcggctaccaagaattggcaaagcgttactgtaaaaatattctgatgggtacatggttatggcgcaataatcacacgttaggaactcggattgatgtgattacgtcgagtggccgctgttacgccattgacgatgcccgttatttggattggattgattggccggaagaagaacaagtaatgctgaatgacttggcttcagaaatggcggcggcattgtgtgaacccaaacaattttggtttgcagacataaaagcgacgttgaaaacggggttttgtcaggagcttcatcccagccagaagtttactgatagtcatgaacaaggagagtcatctaaacagtacgccacggtagaatgtcctaatggtattcaagctgcatgttttcatgccgagaaggttggggcggcgctacatctgattgatgattggtgggatgaggttgcagataagaggctgcgaactcatgaatacggggcagatcgagactacctgatcgctcgccgccacccaatgaagaagcaagacttttattcgttactgacactaactgctgtgtttatcaggcagcttaggaacgtcagggataaagggggggaaattccgcctcaagttcattacctaatggctgtgttgtgcaaagccggtatgtttcagcgaggtaaaagctga

SEQ ID NO: 1810 - DNA, 624 bp, Photobacterium ganghwense
  source 1..624: mol_type = genomic DNA
atggctaatcgtttttattttctgattcgttatatgccagaagatgtggatgaggggttattagctgggcgttgtattagtatcttgcatggtgtgttgtcctcggatcagaatgatattgatggcggtattggcgtggtttttccgcaatggagctgtacgtctttagggcggagtatcgcatttgtttccgataatcagcgacatttagaacagttaagccagcaacattactttgctgtgatgaagggggataacctctttgatatctcgcatatccaagcagtaccatcaggcttatcagaaatacgattcaaacgtaaccaaggaatcgcgaagtgctttgcaggtgaaaaacgtagaaggttagctagggcaaagcgtcgagcagaagcaagaggtgaagtctttaatccaaagcacggtatgtcagatcgtgaagtgagcctatttcacaaagcggttatgaccagtaaaagcacaggccaaaaatacttactgcatattcaaagagaaacagttacaggatcgagtgtgagtcagtattcgcaatatgggctagcaaccaacattgagtgcatgggcacggtgcctgatttaagtccgataataccctttttttga

SEQ ID NO: 1811 - DNA, 28 bp, Photobacterium ganghwense
  source 1..28: mol_type = genomic DNA
gtgacctgccggataggcagctgagaaa

SEQ ID NO: 1812 - DNA, 510 bp, Photobacterium ganghwense
  source 1..510: mol_type = genomic DNA
tgtagcttgcaccataaggctacatagccaaccacttataaatcagaagcttagttatttctcttcaccataagcatgcataaaaaggcagcataacccgacataacactacatgcgaacattctgcctctcagttacatgtaagttattttcttacatgaagaacagaaccagatgcctcaaagaaacaaaacccgcatcaagcgggcttatcttgcttagagctattaacgactcttattggattgcgnnnnnnnnnngatggatgatgaatattctaggtgaaagcaggtatcgaactctaagtaggattcaaccgtcatagcctgattcattttggcactgacgaacttaaaaagattttttacgcgggaatgtttgagctttcggcggtacatagtagaccagcctgtttgttgttaaactacaacaaaaatagcttatgcacgcttattgtaccaattatgcagggtatcaaggaagatatgcaggcttatggtgcaaactaca

SEQ ID NO: 1813 - DNA, 630 bp, Shewanella sp.
  source 1..630: mol_type = genomic DNA
atgtatattcgaaatttacgtaagccttcgcccaataaaaacgtctttaaattcgcgagtgcaaaagtgagcgaaacgataatgtgtgaaagtacattggagttcgatgcatgtttccaccatgaatataatgagacaatcgagacttttggcagccagcctaaagggttttattactgttttgaggggaaaaggttaccttatacgcctgatgcgttacttcactacattgatgggacgacaaagtttcatgaatataaaccttacagcaagacattcgaccctatttttagagcaaagtttgtagctaagaaagaggctgctcaggcactcggcactgagcttatacttgttactgataagcaaattcgtgtaaatccaatcttaaataatctcaaattgcttcatagatactctggtatctatggtgtgactgatatccaacgtgagttgctacagttgattcgacactcaggaaagattcagttggatgatgttgctgatgaatatgagctttcagtcggtgaaactcgctcgtttctttattcactaatcaataaaggcttgctagaggcagatctaactcaagatgaccttagctgtaatccatttgtttggtgtaatgcatga

SEQ ID NO: 1814 - DNA, 1854 bp, Shewanella sp.
  source 1..1854: mol_type = genomic DNA
atgattgaatttaaagatgagtttacagagtctacatctgtcaaaaagcccgatacccctggtcaatacatcaagttagatgatgctgagatacttaagcgcgatcttgatacttttcctgactttcttaaagaaaaagcctttgataaatataaactaattagttttattgagcaggaaaactcagggggatggacgcaaaaaaagctagatccaattcttgataaactatttgaaggcaatagagataaacggcctaattggcgtaccgtggttcgttggcgtaagagttatatcgatagtaatggtgatttagcctctttggttgttaagcgccataaaatgggcaaccgaaagaaacgagtggaaggcgacgaggtattttttgagcgagcattatctcgttttctagatgccaaaagaccgaaagtgacaacggcctaccagtactataaagatgccatcacgattgagaatgaaacaatcgtcgatggggaaatccctattatttcctataccgccttcaatcaaagaataaagtcactgccaccttatcctatagctgtcgctaggcatggtaagttcaaagctgatcagtggtttgcatattgttcttctcatataccaccaactcggattttagaacgggttgaaatagatcatactccacttgatttaatccttctcgatgatgaattacagctccctcttggaagaccctacctgactttaatcgttgatgtttttagtaattgtgttttaggttttcatttgagttataaagctccctcttatgtatcagcggctaaagctattgtgcatgcgataaagcctaaaactctgggtattgtcggaatagagcttcaaaatgattggccttgttatggcaaatttgaaaccttagttgttgataatggagctgagttttggtcaaagagtttagaccatgcttgtaaagaagctggtataaatattcaatataaccccgtgcgtaagccatggttaaagccgtttgttgagcgtttctttggcatgattaaccaatattttttaaccgaactcccagggaaaacgttttcaaatattctagaaaaagaagactacaaacctgaaaaagacgccattatgcgtttttcagtatttgttgaagagtttcatcgttggattgttgatatttatcatcaggattcagactctcgagatacgcgtattccaataaagcagtggcagcatggctttgatgtctatcctccattgcagatgagtgtggaagatgagaaacgttttaatgttctcatggggatcactgatgaaagaacattaactcgaaatggttttaaattcgaagagttgatgtatgactcaactgcattagcggattatcgtaagcactacccacaaactaaagacacaataaaaaagctgattaaaatagaccctgatgatctctctaatatccatgtttacctcgaagagttagagggctacctcaaagtaccttgtaccgatactacagggtatgccaatggtttgagtctgcatgagcataaagtgattaagaagattaaccgtgaaattatacgcgagagtaaagacaacttaggtttagccaaagctagaatggcaattcatgctcgagtacaacaagagcaagaactctttaatgaatccaaaacgaaagctaaaatctctgcagtaaagaagcaagctcaactcgccgatattagtaacaccggtcaaggtactattaggcttgaaaacagtgacaccctttcagacataaccaacaaaccagagtctaatatcagtgatatcctcgataactgggatgataatatagaggggtttgaatga

SEQ ID NO: 1815 - DNA, 1032 bp, Shewanella sp.
  source 1..1032: mol_type = genomic DNA
atgaataccttaaccgctcatcagatggagcaattgggcaggtttaatgattgttttgtcatgcatcctcaagctaaggtcattttcaatgattttgatgatctaaggttaaatcgaaactttcaatcagaccaacagtgcatgttgttgaccggagatacaggtgtaggtaaaagtcatctgattaacaactataaaaaacgagtgttagctagtcaaacatatagccgtacttcaatgccggtattagttacccggatctcaagtcataaaggtcttgatgcgactctgaggcagatgttaactgatttggaatcatttggcagccaacaacgaaaagggcagaattataaaatagatttgaaaactcaattggttaaaaatttagttagagcgaatgtagagctacttattttcaatgaatttcaagagttaatagagtttaaaacacctaaagagcgtcaaacaatagctaatgaattgaaattcatcagcgaagaagcaagagttccaattgtcttagttggcatgccttggactgaacaaatcgctgaagaaccacaatggtcatctcgcttaatacgtagaagaaagcttgaatattttagtctccaaaaagacagtaaatattatcgtcaatatctaataggcttagccaagcatatgccctttgatgagcctcccaagattgaagataaacatattgctataccattatttgcagcctgccgaggtgaaagtagggtattaaatcatctactatcagagacattaaaacttgtaatggtgaatggtgatcgcagtcttgatattaggcatttagctcaaacttatagaaaactttatgagagtcaggaaagtgaggctgcttcggttttttttaacccttttcttgagccgctagataaggtccttatttcagaagttgttaagccatcccgatataaccccaatgcgatgacccctgatgagatgttgattaagcgcgagttttctgcgccgagtaccttagctcaattactcagtaaatga

SEQ ID NO: 1816 - DNA, 1236 bp, Shewanella sp.
  source 1..1236: mol_type = genomic DNA
atggcttttcttttttctcctaaagcgcgatcatttagtgatgagtcacttgagagttacctgctgcgagttgttgctgagaacttctttgattcctatcagcagctgagtttagccataagggaagagttacatgaacttgattttgaagctcatggcgcatttcctgtagaactaaaacgacttaatgtttatcacgctaagcacaatagccactttagaatgcgggcattaggcttacttgaatctctccttgatttgccgcctcatgagctacaaaagctagcactacttcgctcgaacaaaaggtttgttggaggtatgtcggcagtgcatcgtaatggtgtagacattccattgagctttattcgttgcgctgatgaagacggtatcgaaagcctacctatttgccctcaatgcctgaaagaagagccctatattcgtcaggcttggcatattaagccaattgaagtgtgtgccaagcatgagtgtgaactgattcatcattgccctgattgccaacaacctatcagttacattgagaatgaatctattactcactgctcatgcggttttgagtttgccaccgcttcgagcgagaaagccgatagccaagcggttgtattgtcccgtagcttgtttgatggtgatgcattatctaacaatcctctgttatttatgggtacttcagtgactcatcgatttgccgctttgctttggtacctgaagcgtcatgttcaaaatatagagtgtaagttggatgagtctgtaaattactttgaagcttggcctgaaaacttttatcaagagttagatgagcttttagctggtgctgagctgaagcttattgatttgtttaatcgaacgtctttgagttttatttttggtgagttgattttacagtctcaatgtttattgccagaagataaaacaccacactttatcgatatggggttaatggaataccttggcaaattagttgagtcacatcctaagtctaaaaagcctaatgtggctgacatgttggtgtctgtgactgaaaccgcagttttgctctctaccagtcatgagcaagtgtatcggctttatcaagatggtgtgttaactgctggatttaaacaaaagattcgcactcgaatcgatcctcatattggtgtgttctacttaagacaagttattgagtacaaaacgagttttggtaacgataaacaagggatgtatttatcagcatggtag

SEQ ID NO: 1817 - DNA, 2100 bp, Shewanella sp.
  source 1..2100: mol_type = genomic DNA
atggtagataaactaaaattccacgaattgctcgatattgacgatatctctgagcgtaatattgctttaaggcgagcatttactggctatacagtgccgatggatgtgacgggcaatgaggcctctgcgttaactattttacttaatctgacttaccctagaaaacgggttgatgatctacttgataaacggttagccaagcagacactcaatactgatgcacatctagatgccagtattgacgaagtgcaatggttacatacgcataatttaaagtatccagacatacgagtaagcaagcaaaggctgattacagcatctccgctatcacactctcatatattgagtagtgcaaactgcataagcaccttgggttggtcacatgacagtgccaaagtgaatttagcaaagttgttttcatgtcattttaattggcaagaccgtgtttgttgtcttgcaactttgttgtcagatcctcctaaaatttggaaagaagcttttcaagcgttaggcatgcttgtgaaggactttatgaatttgtgtggcaggattaaagcttcattgcctagctatgagagtcccagtcgtgtcgataaatattcgattcaagttcgcctgccttatcgagatggctatttggcgatcacaccagttgttagccatgcacttcaagctgaaatacaacaagctgcaatggctaagcagtgccgatacactaattttgagtttacacgtcctgcggctgttagtgagctgtcggcctctcttggtggtaacgtcaaagcgctgaattatccacctcggataggaaatgcagtgcatggattaagtgactcttggttattaaaatttcaagcaggtcaaacagtattaaaccaaggtgcgttatcacaacctcgatttaagagagccttagagggtcttctatcaaatggttttgaactggcattgaagcaacgcaggctgcataaagtagcaagcatgaggcagataagagcaaccttgactgaatggttgtcaccattattagagtggcgtttagaggttgaagagaacaagaataatgttagcgaactcgcctgtattcatggctcatttgagtatcagtttttaactgcgcaaaaagaaaaccttgtcgggttactaaacccaatgtttagcctgttaaatacaatcttgtctaactcaaacacattacaaaaatatgccttccatcagcgtttgatgaggccactgaaatgtagtttgaaatggttgctcgataacctctcgaaagaatcgaatgcaatagattcagatgaagacaatcaacagcgttatttgtatttgaaaggcataagagtatttgatgcccaagcgttatctaacccttattgtgcaggtttaccttcattaacggctgtatggggcatggttcataactaccaacggcgattaaataaaaggctaggtactcagcttagattgacctcattttcatggtttattcgccagtactcatctgtagcgggtaaaaaactgcctgagtacggtatgcaagggcaaaaagaaaaccagtttagacgggctgggattgtagataacaaacattgtgatttagtgtttgatcttgtagtgcacattgatggctatgaagaggacttagatgcaatcgataattctacagatgctataaaagccagttttcctgcaacatttgccggaggtgtaatgcatcctccagagatcggctcagtcgatgagtggtgtgagctgtatcctagtgaaacatcactttattcgaagctaaggcggcttcctgcatccggtaaatgggttatgccaactaggtatcaaatggatagccttgatgggttgctgcagctattgaagctaaatgtagcactctgcccagtcatgtcaggatatctgatgttaggaccccctgaaagccgcaagaattcgttagagccattacattgttatgctgagcccgcgataggagtggttgagtgtgccactgctattgatataaggttgcaagggatgagtaacttttttagacgggctttttggatgctcgatataaaagagacttcaatgctaatgaaacggatttga

SEQ ID NO: 1818 - DNA, 1098 bp, Shewanella sp.
  source 1..1098: mol_type = genomic DNA
atggagttatgtaatgttttaaagtacgaccgctctttgtacccaggtaaggcggttttcttctacaaaacagctgaaagtgactttgtccctcttgaggctgaaatcaatcgaattcgaggtcaaaaagcaggctttacagaagcctttactcctcagttcaaatccaaaaacttagcaccccaagatttagcccactgcaatccccttatccttgaagagtgttatgttccgccaaatgttgagtatatttattgtcgtttctcattgagagtacaagctaactctcttaaaccagctggttgcagcgaaccgacagtatttgctttacttgaagagttcgctgccatatttaaagcgtgtggcggttacaaagaactagctactcgatactgtaaaaacgtgctgttaggcacctggctctggcgtaaccaaaatacggggaactctcaaatagatattaaaactagcgctggtaattgctatcaaatagctaatactcgccaacttgcttgggacagtcgttggcctgccgatgctcagcaagtattggaagagttaagtgatgaggttcatcaagcgttaactgatcctactgtattttggcatgccaatatcaccgcaaaaattgaaacggctttctgccaagagatctatccaagccagtcttttggcgaaaaggcggcacagggtgaagcatcaaaacaatttgctaaagtgaagtgtgttgatggtcgttatgccgttagctttaattcggtaaaaatcggcgctgcactgcaattaatagatgattggtgggatgttgacgattccaagcgattacgtattcatgaatacggtgcagacaaagaattaggtgttgcgcgccgagctcccgaatctaagcagagtttttattctctatttatcaatacagagctctatcttgcagagcttaatcaacagctcgctgaggatgaatattccattagcccaaatatttactatctgtttgcggtgttaataaagggcggcatgttccagaaaaaggctgaagctaaaagcaaatcaaaagccgaaacctccaccgctaaaataactcctgctaaggcctag

SEQ ID NO: 1819 - DNA, 600 bp, Shewanella sp.
  source 1..600: mol_type = genomic DNA
atgcatcgatattattttatggtgcgatttttacctgaacaagcaaacttagctctgttaatgggacgctgcatttcaatcatgcatggctttatttgtaagcatgacattcaagggcttggtgtgagttttccagcttggtctgatgcatcaataggcaatatgattgcttttgtccacacagatatagctgcattgaacgagttaaagctacaaggctattttcaagatatgcaggagtgtggcgtttttaaagtcgataatgttgaagcggttcctgatgattgcgtggaagttaggtttaagcgcaatcaaggtattgcaaaaatgtttgttggtgaagctaggagacgattaaaacgtttagaaaaacgtgctctagcaagaggggaggtttttaatccaaataaaaacgatgagccgagagagttagattgctttcattgcatagcaataggaagcaccagtactgaacaggattttcttttgcatgttcaaaaagaaattgtacaaaagtacgaagaacctgagtttaatcaatatggattagctacaaataagttactgagagggacagttcctgaatttagtgaattttaa

SEQ ID NO: 1820 - DNA, 28 bp, Shewanella sp.
  source 1..28: mol_type = genomic DNA
gtgaactgccgaataggcagctgaaaat

SEQ ID NO: 1821 - DNA, 510 bp, Shewanella sp.
  source 1..510: mol_type = genomic DNA
tgtcgctggaagcataacctgacataggtcgcttcaaactttcaatagcttagttgaaaaatataaccatatcctgacataaaatataaccgtaagctgacaaattgaagcaatctctggagccaaaacttttccatgtacttttatgacaacataatgcgacaaatatcatttacattatatgatttagaagaatggcaataatttagctattctcattctttaaaactcaagacctactcctaactcgnnnnnnnnnntattgggcgaaggcttacgtaaatttcgaatatacatgcgcaaaactcaagcaacttaggtacacttagtgtacagctgctcgatgttttgtcaaatttgtcagactacgctttaacttttaactcaagtaattgattttaataatattaaattatgtagctaaaatacaaaaatgctattttatgtcaaactatgctttaaatttgtcagactatggttgtcttatgtcaatgtatgctttcagcgaca

SEQ ID NO: 1822 - DNA, 624 bp, Vibrio cholerae
  source 1..624: mol_type = genomic DNA
atgtacgttcgaaatctccgcaaaccatctgcaacaaaaaatgtgtacaagtttgcgagttctaaaaaccgaagtgtcattttgtgtgaaagttctttagaacgagattgttgttaccatctcgaatactctaaggacgttttttcattccaatcacaacccgaaggcttctattattcttcaggtaacaaacgttgtccctatactcctgattttctcgtgcgaaaccaagatggttcagagtattaccttgaagttaaacctctcgctaaaaccttttctgaagatttcaaacgttccttcgctctaaagcgtattgcagcacagcatcaaggaaaaccattagtattagtcacagataaacagatacgtaatggagtgtatctagaaaaccttaacttaatacatcgatatagtggactagtggatttcagcttgtcctcaacaaaaattgttgaggagttgagtactgcaggaagaatgtgtattcgttcgcttgcggataacctgaaactatcgattggtgaagtgatagcagtcgtctttcgtttaattggattaggcagagttaatgtgcctttagattctgcaattaatgagatgtctgtgatctcggtgaattga

SEQ ID NO: 1823 - DNA, 1908 bp, Vibrio cholerae
  source 1..1908: mol_type = genomic DNA
atgccttttgatgatgagtttgaatccataaatgatgatactcaggccgaatatgattcaacttctgaggctaagctagttcgaaaacaatacctaccacttgattcagtcactattcatgaacgagacctgtcatctttttctgaagaacagaaaaacaaggcattagagcggtacaaacttatttctgctgtcgctaaagagatatccggtggttggacacctaaaaatattaaccctttaattgataaatacggtctcaatttatcgatcaaacggccaagttacaaatcagttattcgttggtataaatccttttgtgggagcgatggaaacattgtgtgtttagtggatcacaatcactcaaaaggaaatagaaccaaacgaattattgatgacgaatccttttttgttgaggccactgaacgttttcttgatgcaaaaagacccaactattcacaagcgtatcagttttactgcgacagaatcgaaattgaaaacagcaatattatctccggtcaaatatccaaagttagttatcaggcgtttaaagaaagattgaaaaaacttcccccttatgaagttgcattaaaacgatttggtcaaaattatgcgaacaagcttttcaattactaccaatcatcggttccgaccacgagaatattggaacgtgtagagctagaccatacaccactcgatttaatccttcttgatgatgacttactgatacctttaggtcgagcctatttgacgttattggtcgatgtgtttagtggctgtattgttggtttccatcttggtttcaatccccctagctatgtatctgttgctaaagcgatcatccattcagtaaaaagcaaagactatgttcatgatttgaatattgagctcactaatgactggttatgccacgggaaaatggaaacactggttgttgataatggagctgagttctggtcaaaaagcttagatcaagcttgcatggaggcaggtatacactatgaatattgtaaagtgggacaaccgtgggaaaagcctcgagttgaaaggaaatttttagaaattattcagggaattgttggatgggttccgggaaaaactttttcgaatatattggaaaaagatcggtatgacccacaaaaagacgccgtaatgcggtttagtagttttgttgaagagctacatcgttggatcattgatgttcataatgcctcccctgactctcggaatacgaagattcccaattaccattggaaaaagagtgaagaagccttaccacccgcagcgcttagtgaccgagatgaaaagcagtttcgaatcattatgggggttattcatgaaggcgttgtgacaactaaaggtataaaatataagcacttaatgtatgacaatgtggcgttagaacaatatcggaagcagtacccacaaacaaaaaagtctcgtaagaaaacaataaaaattgaccccgatgatctgtctagcatattcgtttatctggaggaaatcggtggatacatcgaagttccctgcaaatacgatcctttgggatacacaaagaatctgtcactgagtgagcatgttcgcattactaaaatacatcgtgattttataaaaggccaagtggatgctttatcattagcgaaagctcggcaggcacttcatgaacgtattaaaacggagcaagagcacctttctttaatgtcagttgagagtcgagcgaaaaaagccaaacatggtaagaaaatggcagctctttcaggtatatcaaatgagcagcctatgtccatacagaatgctttagaaaacaaaaacaagccgttagatgacaactttgacgagcctactcctgtagacaatctaaaatcgctctggaataaacgcaaagcgatgaaaaggtctaaagaatga

SEQ ID NO: 1824 - DNA, 987 bp, Vibrio cholerae
  source 1..987: mol_type = genomic DNA
atgaatctatctgctaaacaagaaattgctgtcgatgaattactaactcaataccacaattcattcgttatttatccagatgtgcaacagatattcgatggccttgattggattgtacgtcgcagtcaatttggaaattttacgccatctatgcttataactggtggcacaggtgcgggcaaaacatcacttattaatcattatgcaaaatatcattttaatgacaatgaagtgttaatcactcgcgtcagaccaagttttatcgaaacacttatctgggcaattgataagttgggtattccttataacactcgttctaaacgttcagaaattggtttacaggattatttcatcaatagtgttaagaaatccaatcttaaactgttggtcatagaagaggctcaagaattgtttgaatgtgcatctcctaaagaaagacaaaaaatacgtgaccgattaaagatgataagtgatgagtgccggttacctatagtctttattgggattcctactgctaaacttattttggaagattcacagtgggatagacgaattatggttaaaagagaactgccttatattcgaataacatcggaatcttcgttagatgtatacatcgatttacttgaagagcttgaaaagcagcttcctatttctgttcaaccggagctttcagagatggatatcgcaatgcgattattatcggctaccaaagggatgctgggagccattaaagagttagtcggctatgcattagagctagcgctgctatcaggtaaatcagcaatcaccaacgacgaatttgcattgggattcgagagaatcaatggccccgatgtaacgaatccgtttacaacagagttggaaaagctattggtaccgcaagttattgagtacgaggggttcatcattgaccccgaaaatggcgaaatcaaatttactaaacaaatatttaaagacataccattagcagctctattgggttag

SEQ ID NO: 1825 - DNA, 1212 bp, Vibrio cholerae
  source 1..1212: mol_type = genomic DNA
gtgaatacagacattcaactttaccctgacgaatcgctcgaaagtttcttgctgcgcttatcgcaagaacaaggctacgagcgattttctcattttgctgaagacatctggttcgacacgttggatcagcatgaagcgattcccggtgctttccccttagagctcaaccgaatcaatatctaccatgcgcaaaccacaagccaaatgcgggtgcgagttcttatccatcttgagaaccaattaaaactcaataactttggtgcactgcgccttgcgttgtcacattcaaaagctcaattttctcccgaatacaaagccgtgcatcggttgggagctgattatccttttgtttttcttgctaaacgcttcacgcctatttgccctttatgtattagtgaggctccatacattcgccagcagtggcaatttctttctcagcaagtttgtgagcgccatggctgtaaattggttcatcactgcccagagtgccaatcgagattggaataccaaaccaccgaaagtattagccaatgcgaatgcggttttgaactccgcaactcaccggtagcagatgcgccagtggctgcgctactggttgcaagatggttgtcaggaaatgactcaaaacctttgggattactgaaggctgaaatgacgccctctgagcgctatggttttttactatggtacgttaatcgttacggtgatattgagaacatcagtttcgagtcatttgttgagtattgctcttgttggccaagagtgctgcaggaagaacttgatgagttggtaaacaaagccgatctcattcgaatcaaagattggaaaaagacgtttttcaatgaagtttttggcgctttacttaaagattgccgccagttaccaagtaggcagttagagcgtaatagcgtgctcacgcaagtgttagcctactttacaaagttaatggcaacactaccttcaagcagcaaagggaatgtaggcgatgtgctgttgagccccttagaagtgtctacattgctttcttgcacaacggatgaggtgtatcggttgtatgagtttggtgagattaaagcagcgattaggccgcggatgcataccaaaattgccagtcatgaatcggcgttcaccctaagaagtgtcatcgaaacaaagctgactcgcatgtgctctgaaaatgacggtttaagcgtgtatctacctgagtggtaa

SEQ ID NO: 1826 - DNA, 2088 bp, Vibrio cholerae
  source 1..2088: mol_type = genomic DNA
atgacgaaattaagtgatctactagcaattgaagacgaagcaataaaacaaactgctctaaaaaagatgtttatgccctatacagaagacgtttgtgttgatgggtatgaacaagaaacgttgacgattttgcttaatctcagttctagtcatcaagctgataggtgctcggattggttggatgtagctcgggctcaaaggtatttaaaagaccgcgaaaacttagatgcctctcttgctgaaatccagtggttccacacacataacctaaagtttccagactgtcgagttaaggaccaacggataattgcgcgacctctttctacagccgaggagtttatttcaagtgcagtattggatcagcgattgggctgggctcataactctgctgtctatcgtcacacattatggttactgaatccttttaaatggcaatcacagccagtgtgtattctttcgcttattcagcagaaaaatccagtttggcttgatctgcttacagaatttggcttggatgtgaagtcacttgctcgcttacaacgtgcaattgaagaacagcttcctgagaatagttttcccgacagtgttagtacttacagtaagcaattacggtttcctttgggggatgattatgtttcgatcacccccgttgtgagtcacgctcttcagtgcgaactagaaataagagcgcgaagtccagaaaacaagttcagttttgtctcttcgtcactgcctaactctgccagtattgggaacctgtgtggcagtttgggtgggtatatgagagtcctaaattacccgctaggtgttaagcaggccaagggtgggacgttaacggaaaaccgtcaaaagagtggtcattactttgatgactatcaggtaactaacgccaaaatttgtcaggtgctaaatcgcctaattgggtctgagccatccaaaacacagcggcaaagagaaagagctcgtaaggttagaagtaagattttacgaaagcaaatagccttatggatgctgccactcattgagttaagagatatcgccgaatctgaacccaatcagcaacaactagagcatgacgacactttagctcaagcctttttgtcgttgccagaatgggagcttggctctttggctggtgagtttaaccgacgcttacatctcgcgtttcaaaataatatctattctgccaagtttgcttatcatcccaaactgatgcaggtagctaaagcacaagtgacatgggtgcttgagcaactaagtaagccaattaacaatcaagatacgttgacgggggagcaatatatctacctgtcgtcaatgagagtgcaagacgcggtagcgatgagtaacccttgtttgtgtggtgtgccgtctttgacggccatttggggattcatgcacgattatcaaaggcaatttaatcaattggttaacaatgattccccagttgagttttcgagtttcgctttttatgttcgaaacgagaatattcaatcaacagcgaagctgacagaaccaaactcagtcgccaaagctagaacggtttctaatgcgaaacgaccaaccattcgcagtgaacgattgtcggatctagaaatagacttagttatcagagttcatagtgaaagccgaatttcagattttagatcagcgcttaaaacggcccttcccgttgctttcgccggaggggcattataccaaccacagctatcgatgcagattgagtggcttagaacatttacaggcaggagtgaacttttccatgttttaaaaggattacctgcatacgggcgatggttatacccaagtgaaaagcaacctactaattttgatgagttagagcggttgctcactcaagacgatgataacttgcccgtttctcttggctaccatttattagagcatccaactaagaggggtaacgcaatcacaggttgtcatgcttatgcggagaatgcgatagggttagctaagcggataaacccgatagaggtccgttttagtggacgagatcactttttaaaccacgccttttggtcgatagaatgcagtagcgaaactattcttataaaaaactatagggattaa

SEQ ID NO: 1827 - DNA, 1032 bp, Vibrio cholerae
  source 1..1032: mol_type = genomic DNA
atggaactttgcactcaattgaactatgttcgatcactttctgctggcaaagcttatttctactatctatccgaaagtggtgagatgtgtccctttaatgtagatagaacccgattgcgcgcaccaaaagggagttattcagaagcatataaggggaacaagttcgtcgacaagaatgttgccccccaagacttggcatattcaaaccctcagttcatcgaagagtgctatgtaaagcccggcgttgatgaaatctattgcgcattttcacttcgaattcgggccaattcgttaaccccagatatctgtagtgatgatgaagtgcgcagtaaactgtctatgtttgctaagatttataaagagctcaacggatacaaagagttagctaatcgttatgcgaagaacatcttgcttggtacttggttatggcgaaatcgtgagtgcagaaatatcactattgaagtgacgaccagtgaattggatacctttgttgtcgaacatgctcaaaaactctcttggtatggtcattgggatggtgattcaacagaatgcttagaaaggcttactgcctatctggagcgagcattgtctgacccaactgaatacttctacatggacgtcaaagcgaaaatgcgggttggctggggagatgaggtttacccaagccaagagtttttggatagtcgagaagatggaatccctactaagcagctagccacagtagagcttttgagcggaaaagaaaccgtcgcgtttcacggacaaaaagttggtgcagcgttgcaatcgattgacgattggtggcatgaagaggctgataagcctttaagagtgaacgaatatggtgcagatcgagaatacgttatagcaagaagacatgtagcatatggaaatgacttctatcaattactcagaaatacagagaactggattgaaagtatgactgcttctgaatccattccgaatgacgtgcactttattatgtctgttttgatcaagggcggattgtttaattgcgccaaggccaattaa

SEQ ID NO: 1828 - DNA, 639 bp, Vibrio cholerae
  source 1..639: mol_type = genomic DNA
atgtctcaacggtactacttcttgatacgttacacgaatgctaatgccgactatggcttgctagcagggcgttgtatctcacaaatgcacttgtttatggttaatcaccaccaagcaatgaatagagtaggtgtgagttttcctgattggaatgaatcttcagttggtcaaaccattgcctttgtttccgaggacaaagagatgatgattggcctctcttttcagccctatttttcattgatggttaatgaaggtttgtttgagatctccagtgtttatgaggtgccagatacttccgaagaagtaaggtttgttcgtaatcagacgattgggaaaaactttttgggttccaaaaagcgtcgaatcaaacgcagtatggctagggccgagttatttggtattcaacaatcattaccagtaacgaatgaagaccgtgccatcgatagttttcatcaaatccctatttctagcggctcttcacggcaggattatattctgtttattcaaaaggaactcgcagatgagcgtgctgaatctggctttaatagctatggttttgcaaccaatcaagaaaaaagagcgacggtacctgacttacgttttaacccttttgacgaagactcttttttagttcagtag

SEQ ID NO: 1829 - DNA, 28 bp, Vibrio cholerae
  source 1..28: mol_type = genomic DNA
gtgttctgccgaataggcagccaagaaa

SEQ ID NO: 1830 - DNA, 510 bp, Vibrio cholerae
  source 1..510: mol_type = genomic DNA
tgtcgctgaaagcataagatgtcctatgcgatcacagaaaatcaaatagttaaaatcaatctaaaaccataaagcgtcctaaactgaaagaataaggtgtcccatgtattgttcgttagaacaagcgatatctgggcatgaaagaaacttacttacgaaaaacgagtgttttcagcattaacattgaacaaatactggcatcttacgtataacaattttttggacataaatcagttaggccttatgctctnnnnnnnnnncgtccttagagtattcgagatggtaacaacaatctcgttctaaagaactttcacacaaaatgacacttcggtttttagaactcgcaaacttgtacacattttttgttgcagatggtttgcggagatttcgaacgtacataacttgtcccttaacgttgtaataaaacaaccaaattaagtttaggacactttatgagttttaaaaggacagcttatgcttttaattggacactttatgctttcagcgaca

SEQ ID NO: 1831 - DNA, 624 bp, Vibrio cholerae
  source 1..624: mol_type = genomic DNA
atgtttgaccaaactaagaaatcatctcatgtgcacaacatctgtaagttcatgagcttgaagaatgatgctgttgttcgcactctctccattctggagttcgatttctgttttcacctcgaatacaacccaaacatcaaaagttttacctctcaaccttttggtttccactatctattcaataaccgtaagtgtcgatatacccctgactttttagcaataggtcacaatgagcaatcaacattcttcgaggtcaaacactctagccagattcctaaacctgattttagggagcgctttgaagaaaagcagagagtagcgttgagtgagttcaacagacggttagttctcgttactgagaagcaaatcaggatggggccaacgctagataactttaagttgttacaccgctactcaggattgcgaacagtgaccgaatttcaaaagcgagttttggcatttattcaacgtaagcaaatggtgaagttgcaagaggtgtctttgtattttggtctatcagagcaagacacgcttatctctactctaccttggatctcttcggggcacgttaaaacagatctcaacactattggctttggtctagaaacttgcgtttggtgctaa

SEQ ID NO: 1832 - DNA, 1866 bp, Vibrio cholerae
  source 1..1866: mol_type = genomic DNA
atgccaccggactctaatagtatatttgggttctttgatgagtttgaagcgtcagaagaagaatcgcaattgctcccaaaagagctaattctagaacccgttgaaatatcatcgaccatagatagtttgccagcaaaaattcaggaggaggttcttcgccgcataaaagtgattacttttgtggagaagcgcttgaaaggtgggtggacagagaaaaacttgaaccccattttaagtctcgttgaatcagaattacagcttactccccctagttggcggactgtagcaacttggaaaaaatcctacgctgaagcaggtagagaagcttcggcacttattccgaagcatacgtttaagggcaaccgccagaaagaaatggattcgcaatccttgattgacgaggcaattcagaacgtatacctgacacgtgaacgacttagcgttgcagaagcataccgatattataagagtcgagtgattcaaatgaatcgagggattgttgaaggaaaaatcaagccaattgccgaacgttctttttataatagaataaatgagttacccccttatgaagtggcgattgcaagatttggtaaacgatatgcagatcgggagtatcggtcggttggtcagcaggtagttgcaactaaacctatggagtttgttgaaatagaccataccccagttccagtgatcttgattgacgatgaactagatattcctttgggccgcccttatttgacgatgctttatgaccgtttcagtaagtgcattgttggttgcagtatcaactttagagagccaagctttgactctgttagaaaggctctgttgaattcacttttggataaaagctggcttaaagcaaagtatccatcgattgagaatgagtggccttgccacggtaagattgattgcttggtcgtcgataacggtgccgagttttggagtcaaagcttggaagattcgttacggcctttggtgtccgacattcaatacagtcaagcagcgaagccttggcgaaagtcagggatcgaaaagttgttcgatcaaatgaataaagggttagttaacgcgctgcctggaaaaaccttcaccaatcctactcaactacaagattacaatccaaagaaggatgcggtggttagggtatcggtatttcttgaattacttcataaatggattgtcgactattaccacatggcaccagattctagagagcgcgagatcccataccacaagtggcaccaatcgaaatggacgccgtcttactatgatggtgctgagaaggagcaactcagagtagagttaggattgcttagacacaggacgattggagtggccgggatcaggctgcataacttacgctatcagtccgccgagcttattgaataccggaaatattgcacacctaataatggcaaacagctctttgttaagaccaaaacagatccttctgatatcagctacattcatgtttacctagaatcagaaaagaagtacataaaagttccagcagtagacaacagcgggtatacaaacggactttcactttttgaacaccaacgcatacaaaaagtacgcagactgaacaccaaggatcttgctgatgatgaggctcttgcggatacatttctgtatatgaaaaaacgtatccacgaagaaaccgatagattccgtcgtgttaaaagtagcaagcccaaccttcctaaaacaggtaacacgtcgagactagcaaagtttaatgatgtcggatctgagggaccaaactcaatcaacgtgactcctgttaggctcaaatctgaggttgtttccgatgcctcagagtacttagatgacgatgattttgaagatattgaagggtattag

SEQ ID NO: 1833 - DNA, 1098 bp, Vibrio cholerae
  source 1..1098: mol_type = genomic DNA
atgacgatgattttgaagatattgaagggtattagtttgaatttaacgccaaagcagcttgagcagctaaagtcctttgaaacctgctttatcgagtatcccgcgataactgaaatctactccattttcgatcaacttcgtttcaatcactctttaggtggtgaaccagaatctttcttgttaactggtgaggctggaagtggaaagacagctttgatcaacaactacttgtcacgctttcaatcgggttcaacttggggaaagcagccagtattaagcactagagtgccaagtcgtatcaatgaacagaatacgctgacccaatttttggttgatttagattgtaaatcaggaggacgaggaattcggcgccgtaatgaaattgcgcttggcgaagcggttgtaaagcaacttaaacgtaaatctgttgagctgattattgttaatgaaattcaagagcttgttgagttttcaaccgcagaacagagacaagttattgccaacacattcaaatatatgagtgaagaagcaagagtttcttttgtgcttgtgggtatgccttatgctgatgtgatagcgacagaaccacaatggaattcgcggctaagctggagaagaaagatagattatttcaaattgttgaaagcgaatagtcattcgagtaaaacggcatcttatgggtttgacttagaacaaaaaaaacattttgccagatttgtcgcgggtctgagttcaaggatggggtttgatgagccaccagtacttacaaagaatgaactgctatatcctttgtttgcaatgtgccgaggagaatgccgagcgttaaaacacttcttgaaagacgcgttgcttacgagcttcaacgacaatgcggatacgatagacaaagcaatattgtcacgcacttttgcatttaagttcccctacctagataacccgtttgatcgtcctttagagcagcttagtcttcatcaaattgactctggttctgcttaccacttaaatgcaatcaccactgaagataaaatagtagcccctcgttttacggacgccattccgttgagcatgctattgagcaaaaatgggcttaaagcttag

SEQ ID NO: 1834 - DNA, 1212 bp, Vibrio cholerae
  source 1..1212: mol_type = genomic DNA
gtgaaaacggacattcaacattactctgacgaatcgcttgaaagcttcttgttgcgtttatcgcaagagcaaggttacgagcgattttctcatttcgccgaagacatttggttcgacactatggagcagcatgaagcgattgctggtgctttccccttagagctcaaccgaatcaatatttatcacgcccaaaccacaagccaaatgcgggtgcgagttcttatccatcttgagaaccaattaaaactcaataactttggtgtactgcgtctcgcgttgtcacattcaaaagctcaattttctcccgaatacaaagccgttcatcggttgggttctgattatcctttcgtttttcttggtaaacgcttcacgcctatttgccctttatgtattagtgaggctccatacattcgccagcagtggcaatttctttctcagcaagcttgtgagcgccatggttgtaaattggttcatcactgcccagagtgccaatcgagattggaataccaaacaactgagagtattagccaatgcgaatgcggttttgaactccgcaactcaccggtagaagatgcgccagtggctgcgctactggttgctcgatggttgtcaggaaatgactcaaaacctttgggattactgaaggctgaaatgacgctctctgagcgctatggttttttactatggtacgttaatcgttacggtgatattgagaacatcagttttgagtcatttgttgagtattgctcttgttggccaagagtgctgaaggaagaacttgatgagttggtaaacaaagccgatctcattcgaatcaaagattggaaaaagacgtttttcaatgaagtttttggcgctttgcttaaagattgccgccagttaccaagtaggcagttagagtgtaatagcgtgctcactcaagtgttagcctactttacaaagttaatggcagcaataccttcaagcagcaaagggaatgtaggcgatgtgctgttaagccccttagaagcttctacattactttcttgcacaacggatgaggtgtatcggttgtatgagtttggtgagattaaagcagcgattaggccgcggatgcataccaaaattgccagtcatgaatcggcgttcaccctaagaagtgtcatcgaaacaaagctgactcgcatgtgctctgaaaatgacggtttaagcgtgtatctacctgagtggtaa

SEQ ID NO: 1835 - DNA, 2088 bp, Vibrio cholerae
  source 1..2088: mol_type = genomic DNA
atgacgaaattaagtgatctactagcaattgaagacgaagcaataaaacaaactgctctaaaaaagatgtttatgccctatacagaagacgtttgtgttgatgggtatgaacaagaaacgttgacgattttgcttaatctcagttctagtcatcaagctgataggtgctcggattggttggatgtagctcgggctcaaaggtatttaaaagaccgcgaaaacttagatgcctctcttgctgaaatccagtggttccacacacataacctaaagtttccagactgtcgtgttaaggaccaacggataattgcgcgacctctttctacagccgaggagtttatttcaagtgcagtattggatcagcgattgggctgggctcataactctgctgtctatcgtcacacattgtggttactgaatccttttaaatggcaatcacagccagtgtgtattcttttgcttattcagcagaaaaatccagtgtggcttgatctgcttacagaatttggcttggatgtgaagtcacttgctcgcttacaacgtgcaattgaagaacagcttcctgagaatagttttcccgacagtgttagtacttacagtaagcaattacggtttccatggggtgatgattatgtttcgatcacccccgttgtgagtcatgctcttcagtgcgaactagaaataagagcgcgaagtccagaaaacaagttcagttttgtctcttcgtcactgcctaattctgccagtattgggaacctgtgtggcagtttgggtgggtatatgagagtcctaaattacccgctaggtgttaagcaggccaagggtgggacgttaacggaaaaccgtcaaaagagtggtcattactttgatgactatcaggtaactaacgccaaaatttgtcaggtgctaaatcgcctaattgggtctgagccatccaaaacacagcggcaaagagaaagagctcgtaaggttagaagtaagattttacgaaagcaaatagccttatggatgctgccactcattgagttaagagatatcgccgaatctgaacccaatcagcaacaactagagcatgacgacactttagctcaagcctttttgtcgttgccagaatgggagcttggctctttggctggtgagtttaaccgacgcttacatctcgcgtttcaaaataatatctattctgccaagtttgcttatcatcccaaactgatgcaggtagctaaagcacaagtgacatgggtgcttgagcaacttagtaagccaattaacaatcaagatacggtgacgggggagcaatatatctacctgtcgtcaatgagagtgcaagacgcggtagcgatgagtaacccttgtttgtgtggtgtgccgtctttgacggccatttggggattcatgcacgattatcaaaggcaatttaatcaattggttaacaatgattccccagttgagttttctagtttcgctttttatgttcgaaacgagaatattcaatcaacagcgaagctgacagaaccaaactcaatcgccaaagctagaacggtttctaatgcgaaacgaccgaccattcgtagtaaacgattggccgacctagaaatagacttagttatcagagttcatagtgaaagccgaatttcagattttagatcagcgcttaaaacggcccttcccgttgctttcgccggaggggcattataccaaccacagctatcgacgcagattgagtggcttagaacatttacaggcaggagtgaacttttccatgttttaaaaggattacctgcatacgggcgatggttatacccaagtgaaaagcaacctactaattttgatgagttagagcggttgctcactcaagacgatgataacttgctcgtttctcttggttaccatttgttagagcatccaactaagcgggataacgcaatcacaggttgtcatgcttatgcggagaatgcgatagggctagctaagcgaataaacccgatagaggtacgttttagtggacgagatcactttttaaaccacgccttttggtcgatagaatgcagtagcgaaactattcttataaaaaactatagggattaa

SEQ ID NO: 1836 - DNA, 1032 bp, Vibrio cholerae
  source 1..1032: mol_type = genomic DNA
atggaactttgcactcagttgaactatgtccgatcactttctgctggcaaagcttatttctactatctatccgaaagtggggagatgtgtccccttgatgtagatagaacccgattgcgcgcaccaaaagggagttattcagaagcatataaggggaataagttcgtcgacaagaatgttgccccccaagacttggcatattcaaaccctcagttcattgaagagtgctatgtaaagcccggcgttgatgaaatctattgcgcattttcacttcgaattcgagccaattcgttaacaccggatatgtgtagtgatgatgaagtacgcagtaaactgtctatgcttgctaaaatttataaagatctcaacggatacaaagagttagcccatcgttatgcgaagaacatcttgcttggtacttggttatggcgaaatcgtgagtgcagaaatatcactattgaagtgacgaccagtgaattggatacctttgttgtcgaacatgctcaaaaactctcttggtatggtcattgggatggtgattcaacagaatgcttagaaaggcttacagcctatctggagcgagcattgtctgacccaactgaatacttctacatggacgtcaaagcgaaaatgcgggttggctggggagatgaggtttacccaagccaagagtttttggatagtcgagaagatggaatccctactaagcagctagccacagtagagcttttgagcggaaaagaaaccgtcgcgttccacggacaaaaagttggtgcggcgttacaatcgattgatgattggtggaatgaaaacgcagataagccattaagagtgaatgaatatggtgctgaccgagagtacgttatagcaaggcgacacgtaacccatggaaatgacttttaccaattagtcagaaatacagagaattggattgagacaatgacagcttctcgaaccatcccaaatgatgtgcactttattatgtctgttttgatcaagggcggattgtttaattgcgccaaggccaattaa

SEQ ID NO: 1837 - DNA, 630 bp, Vibrio cholerae
  source 1..630: mol_type = genomic DNA
atgtctcaacggtactacttcttgatacgttacacgaatgctaatgccgactatggcttgctagcagggcgttgtatctcacaaatgcacttgtttatggttaatcaccaccaagcaatgaatagagtaggtgtgagttttcctgattggaatgaatcttcagttggtcaaaccattgcctttgtttccgaggacaaagagatgatgattggactctcttttcagccctatttttcattgatggttaatgaaggtttgtttgagatctccagtgtttatgaggtgccagatacttccgcagaagtaaggtttgttcgtaatcagacgattgggaaaaactttttgggttccaaaaagcgtcgaattaaacgcagtatggctagggccgagttatttggtgttgaacaatcattaccagtaacgaatgaagaccgtgtcatcgatagttttcatcgaatccctatttctagcggctcttcacggcaggattttattctgtttattcaaaaggaactcgcagatgagcgtgctaaatctggctttaatagctatggttttgcaaccaatcaagaaaaaagagcgacggtacctgacttacgttttaacctttttgaagaagattctttttag

SEQ ID NO: 1838 - DNA, 27 bp, Vibrio cholerae
  source 1..27: mol_type = genomic DNA
gtgttctgccgaataggcagccaagaa

SEQ ID NO: 1839 - DNA, 510 bp, Photobacterium iliopiscarium
  source 1..510: mol_type = genomic DNA
tgatgcttgcagcataagtctgcatagacagagctagctttcaagtagttacgaagaaatttgcagaataagttcgcataagattgcatcaaaagtcagcatatttgagtaggtatctaaattctacgttgtaaagttactacaacaatattctttcaatgatcgatgtcttacatttctactcacagagtacaatttgaggatgtgataggcgtcagtatttcttggacaacatataaaacagagaaagnnnnnnnnnnttgatgtttgggttgtattcgaggtgaaaacagaaatcgaactccagaatggagagagtgcgaacaacagcatcattcttcaagctcatgaacttacagatgttgtgcacatgagatgatttcttagtttggtcaaacatagctaagtcacttttgttgtaaacctacaacaaaacgtagtctatgcagacttatagtgcaaatttgcgaaatattctgcaatttatgcgaacttattttgcaaacatca

SEQ ID NO: 1840 - protein, 229 aa, Vibrio cholerae
MSALPSPSTTTLIALESAFVTPARNLTKSRGKNIHRYVSAKMGKRVTVESFLECVACYHFDFEPSIVRFCSQPIRFSYGLNGKTHTYVPDFLVQFDTGEFKLYEVKSDMESSKEEFQCEWEAKVQGAFELGLELELVTEEEILDEVIFSNLKLLHRYASRDNLNHFHQTLLATFKLNGTQTAKSLGHHLGLNGRKILPFLCDLLSRNLLQTSLETPLSLESEFELGCYA

SEQ ID NO: 1841 - protein, 603 aa, Vibrio cholerae
MPNKSFSSFHRKSAFQQEKLEPNDRVVDDNDVDEATYQDISAFPDNIATQITFRLSILRYLASKCERIIPKTIEPHRVGLQRLHDRKIPSAISIYRWWLVFRASGCNPVSLAPKNKNKGNSKAKVPTFVDALMEQAVDRVISGRKVRIRSAYRRVRRKLRQHNLNNGTKYKYPTYESLRKRVKKKTPFELLAAKKGERVAKREFRRMGKKILTSYVLERVEIDHTVVDLFAVHEEHRVPLGRPWLTQLVDCYSKAVIGFYLGFEPPSYVSVSLALKNAILRKDDLLSSFDSVENEWLCYGIPDLLVTDNGKEFLSKAFDKACESLLINVHQNRVETPDDKPHVERSYGTINTSLLDDLPGKAFSQYLQREGYDSVGEATLTLDEIKEIYLIWLVDIYHPKSNQRGTNCPNVAWKRGCQEWEPEEFNGSKDELDFKFAIVDQKQLTKAGVTVYKELTYSSERLAEYRGKKGNHKVQFKYNPECMAVIWVLDEDLNEYFTVHAIDYEYASRVSLWQHKYNMKYQAELNSAEYDEDKEIDAEIKIEEIADRSIVKTKKIRARRRGARHQENSARAKSISDAKPVPSQKHEDEIVIVDNEDWDIDYV

SEQ ID NO: 1842 - protein, 329 aa, Vibrio cholerae
MNETREARISKAKRAFVSTPSVTKILCYMDRCRDLSDFDSEPTCMMVYGASGVGKTTIIKKYLNQNRRDSEVGGDIIPVLHIELPDNAKPVDAARELLVEMGDPLALYETDLARLTKKLIDLIPVVGVKLIIIDEFQHLVEERSNRVLTQVGNWLKMILNKTKCPIVLFGMPYSKVVLQANSQLHGRFSIQFELRPFSYQGGEGVFKTFLEYLDKALPFEKQAGLANESLQKKLYAFSQGNMRSLRNLIYQASIEAIDNQHATITEEDFVFASKLTSGDKPITWKNPFDEGVKVTEDMLRPPPKDIGWEDYYHNVKPKNQRRKGSNMFE

SEQ ID NO: 1843 - protein, 397 aa, Vibrio cholerae
MKTMLLQRPKPFEDESLESYLIRIANRNGYQDVDRFLSALKHYLCDGDSEKFSSFPTDIRRINPYSSKHSSAARSHALHKIGQLTFTESVDLLKLAINRSPLKYSPSVTAVIRGHEVFPRSLLRTNIIPVCPVCLQENGYASYLWHFEGYDYCHIHDLALTYNCQCGKPCDYRVSGLQLVCSSCGTTLTHLLEKPTDRSSDISHWLAGETIKWLPAVPVSYRWGLVHWWMNNKKSKELETESFTIFWKNWPNSFHNLIQETLSYNQTYSLVAPTQWRLKDLLGEILFSSINLPGRNLQYNLILRELFHYLENHLWENNGLIANLRLSAFEVSLILGCSTEEVASMSEQGLLIPIQNRKRYEPMSLTNCIFHFGDVFCIWLAEFQTDEFNRSFYTSRW

SEQ ID NO: 1844 - protein, 642 aa, Vibrio cholerae
MTLDELLATTKYEELVSSTKRSFRPLSPLIDITNNPMTALTILVNLTEKGISNKNLLDKERCKEKLRDDKWWAAVLKPAQYRHSHNVKFPDIRSTGTIRTVAPDNLPAYFITSSKLPNVGWTYSKDSSDINRCLFFTSEFLWAGQPCCLARALTDSEHPLWSTLKKLGCYEKNKKLAAKLLSQIPGELIDVDLTGNYLSQVSFPDGRDSYLSFSPVASQAMQSCVYQSLEQHYRQTALMRFDRATNMGLLSASCGGRFRLIETKPYIKDKRHHYISELPNWLTKEAIQSVEQFLRSEQWLVTHNDKPRNMAIVKSSIRSMVNRWLSSRTNTEALSPAELAEQLNNDIASKRIIKRYAYQPKLTRLFIQLIENTGEDNAYKEDRKPTTNSQYLLIPELRISGGSAISSSVSVGLFSMMSLYGFIHAFERNMQLVLTSFTIDSFAICVHDYHLEKRGLTKEPIKKAKVRKDEQEKIAPPAIYDDYQFDSCISLIIKTSESKTIPAEKMVALLPKRFARGAIRLSIDGIQEIGAFPKPLPAIQAIKNPLGSWLSFEPDLSLISTDSIVDIATNHNNLWLTVMGYQYLEPPTTKPSSLRDYPHALVENILGFVKPRTVTKSTNLDDLFWRYQIQPFGVCLLPRSIK

SEQ ID NO: 1845 - protein, 345 aa, Vibrio cholerae
MKLPIHLAYERSISPSDVAFLVIWPDGYKEPLPCYSRTILGLNEGSHVGYDGSGAVRNNLKMNTLVDGNIHELDYCSVPYGAKSIECCFSVSFSSELLKPYKCSDAGVKKTLREFVSLYNQHVGLEELIIKYLTNIALGTWLWHNTKRSYCVSIEIRPWPWEGETIIIDDIRKYLKGDRATNDLLNWNKLIEQVKEAFTDPMGLCILEVKANLIKPSMAQLYPSQMFKEAAKKENNRLYQSTIIDGIKSPIMGCYKTGAAIATIDTWYPDAEEPIRVGHYGVDRENSTAYRHPDTGKDFFSILKRIDELVDRLKDAKELSQDELKDMHFLMANLIKGGLFQEKGE

SEQ ID NO: 1846 - protein, 197 aa, Vibrio cholerae
MILYYRTVTFLPKIKNNEALVGHCLKVLHGVCTKYTINTIGVSFPEWGEETIGDKISFISPNQLELDFLLQQTYFSEMTALGYLNISQSKSVPEQYNLAVFRRNQKIDQATPNGQRIRAERLAKRAMNRGDSPIRFTPEDLVFEHYHSIPITSTRSGKSFRLNLQYQRLDTVPDGQWAFSSYGLANQELESSPVPVI

SEQ ID NO: 1847 - protein, 228 aa, Photobacterium iliopiscarium
MQPSPATTYQTDSPLEFAFTQPARKLTKSRGKNIHRYVSIKMNTIISVESTLEFDACFHFDFNKNISRFCSQPIRYSYVIDGIIRTYVPDFLCEFYCGEMVLYEVKAPNAVNSKRFTKEFEAKRQYARKLFDVDLELIEEHDIRHIPLLKNLKRMHRYASHSELTYEQTTILKYLNKHGSTKLETIIDHFSNSKNIIPMIYDLLSKYLINTDLRVLLNNQTELKTTYV

SEQ ID NO: 1848 - protein, 603 aa, Photobacterium iliopiscarium
MSRTSFSSFHGTPTSDSENASSKLTFIENDDLQDLTSFSKKAQNEAKLRLSILRNILNKSSEINLVLIERLRADLQQQGERSIPSAITIYRWWLTYKKSNFSILSLVPKTKQKGNRNTKVPKTISVYIDQAVEQVISANKINVSTAFRRVRRKVRQYNLTHKTKHTYPSYEAIRKRVKKITPYEKLAASKGDRIAKREFRRMGKKIQTEYLLERVEVDHTWLDLFAVHEEHRVPIGRPYLTQLVDCHSKSVIGFYLGFEPPSYMSVALALKNAIKRKDNLLQNYPSIQNEWLCYGIPDLLVTDNGKEFLSKDFTLACDSLLINIHQNRVETPDNKPHTERQYGTTNTELLNDLPGKTFSNYLQREGYNSSDEASLTLSEIKQIYLTWLVDIFHPRPNSRGTNCPNRVWKHAEKNWPPNEFLGTDEELDFYFTKLDKRMLRKEGIGLATELFYSSERLAEYRGKKGNHKVAIKYNRENMGFIWVLDEDTESYFKVPAIDYEYASTVTLWMHKKNLKIKQELNITEHNLDSEIDAELRIDEIVDQSIQKKKTTITNKRRAARYQENEQMAANARQPKEKKSANNQKTSTKNIEKEDSSGWDIDYV

SEQ ID NO: 1849 - protein, 328 aa, Photobacterium iliopiscarium
MDDNITRITKAKKAFVSTPDVAAIINNIDRCRRLSKFGAEPSCMMVYGASGVGKTSIIRKYLKANDKDSTARQDIVPVVYIELPENAKPVDAARELLLYLEDPLALYESDLAILTKRIVDLVPTMKIELIIIDEFQHLVEKSSNRILSRVGDWLKMLINKTKCPVILFGMPYSKVVLAANSQLRSRFSIQFELKPFSYINNYGIYAGFLRRLDEALPFDQLSNLASEPIAKKIYAFSQGNMRSLRNLVFHAAVNAIENDNNCISKNDWEFASNLTSGNKLSTWKNPFAQGVKITDRMLQDQPNDLGWEDYMRNNRGKRKPFDESKIFS

SEQ ID NO: 1850 - protein, 392 aa, Photobacterium iliopiscarium
MFLQRPEPYSDESLESFFIRVANKNGYEDIHRFLIVTKKYLQDENHDRFKAFPTDIKTINPYSSKNNHGSRVAALHKIALMTFNEQPEILSLAINRTSLIYSPSTTALVRGSEVIPRSLLRKNIIPCCPRCLHEEGFGHYLWHFNGYNYCHKHNTPLIYKCACGADYDYRIAGLNGFCRECDTYLNPNQQHPDSAESKTSAWLSGKTIEQLPDLPQSYRWGLIHWWTHLTQKEFDGASFIDFWHRWPESFHHLIQQKIEFNLEHSIIHHDNLKLKDLLGDLFFNCIRLPERNLKYNIVLNELLRFIDDNLWGNNGRLANLKMNAVEVSIFLNCSCDQIVLMVEQRFLKPSRKAKPNKPLSFTDYLFHLGDVYCLWLAEFQTDEFNRTFIISR

SEQ ID NO: 1851 - protein, 636 aa, Photobacterium iliopiscarium
MSTLAKIINSSSSDINVELKRAFRPLSPNIDITDNEDIALIILTNLAAKVDAKKNLTDRENCKKKLKDNNWWSRCINTMKFRQSHNVKFPEIKATGIIRAHPMGEIPKYLLSSSKLKQKTLAYANDSKDVSVANFLISEFILHGKICCLGVLLTDEQHPLWDRLTKLGCYQKTRKYVAKQLKKIPNSCIEVQLGANSVRQISLPDGNNSYLSLSPVTSQTMQSSCYQSLHKHYWLSKITRYSRASNMGVLPMTCGGTLRMLSHTISFEDVKHCQISPNSSWLTKDSIQAFYDYFDSSNWMMPHIQKQQKLKILKITITEMISRWLALQKNTIQHNQLELVHKLNFDLSNTKSLRQFAYDPKTTRFLFTLIENRSNTQQPNENFDNQYLLLPQISVCGASAMSSSITIGIPSLTAFYGFIHAFERNMQKVFSNLKVDSFAICIHTFHLQKRGMTRESIIKLTSNISSPATHDEWHCDLKFSLALKVNNLTHLNQSEILYALPKRLAGGYARINIDDIKTIQVSSSFKDLVKQIPTFQGQWLSLYKAKIDSFESIIQQIKASQNIIPTCVGYHYLEKPTERTFALRDYKHAFAEPIIGLIKPITIKEDTSLHDLFWDQINKPHYTTIETRNMNNEAPY

SEQ ID NO: 1852 - protein, 349 aa, Photobacterium iliopiscarium
MKLPISLAYERSIHPSDVCFFTIWPDGNKAPLSFMSRTVLGQMETASLAYDTKGNPKQTATPEVLAQGNPHHMDFCSVPFGAEHIECVFSVSFSSELRKPYKCSEPEVKNTLIELVKLYESKIGWDELAGRFLTNICQGKWLWKNTKKTYQLNIEIKPWPWKNNPVIFEDIRTNYSTYNDCQSDTKWQELKQLIINAFSSKNGLAIFEIKAQLTLPTNAELYPSQAFIEKDKKEKKHQSSRIFQHTSINGQKSPIIGCYKAGAGIFMIDDWYPNAEEPIRIGRFGVHQQDVTCYRPPSTHQDLFSLLEQSEKYIALLKNRKKTPQKTINELHFLMANLIKGGLFQHKGE

SEQ ID NO: 1853 - protein, 199 aa, Photobacterium iliopiscarium
MDWYYKTIRFIPTNCNNEFLAAKCINILHGFSYRYDTHSIGISFPNWCNETVGDRISFVSIEKMALDYLLTQNYFKEMQDLGYFDISKTLIVPIECNFACFKRYQKIDKSSAAGFHRKIKRLAKRAHNRGEVFDNKKYNIYKQCDIGHYHSLAEESKSKGYGFRLNIQRTNEISINNIPIFSSYGLANTAHALQSVPII

SEQ ID NO: 1854 - protein, 209 aa, Pseudoalteromonas sp.
MYRRKLKHSRVKNLHKFASQKNKSTCLVESSLEFDACFHFEFSPSIAAFEAQPLGYEYEFDNRICRYTPDFLLTHTDGTQKFIEVKPQSKIADEDFRARFIEKQTIAKQDGRDLILVTDKQIRVYPTLNNLKLLHRYSGFQSLTELQASVLELVKQYGSIKVGQLVNFLKVTAGELLATVLRLLSLGQLFADLTTNEISIETAIWSNNV

SEQ ID NO: 1855 - protein, 607 aa, Pseudoalteromonas sp.
MFNDGLFDDEFNQPLPKVETKLPQNYAKDLQALPEKIKNTTFAKLKYIQWLEANIQGGWTQKNLEPLLKVMPEVEGEKKPSWRTAARWYSAYTNADKNIMALIPSHQKKGNRERDTATDKFFEKALERYLVKEKPSVASAYKYYADLVIIENDSVVGSVLKPLTYKAFKNRIDNLPQYDVMVSRYGKRLADIAFNKVEGHTRPTRVLEKVEIDHTPLDLILLDDELHIPLGRPTLTMLVDVYSHCIVGFYFSFSEPSYDAVRRAMLNAMKPKSDVAKLYPDTINEWKCAGKIETLVVDNGAEFWSNSLELACEEIGINTQYNPVAKPWLKPFVERMFGTINTELLDPVPGKTFSNILQKHEYNPKKDAIMRFTTFMQLFHKWVVDVYHQDADSRFKYIPSQLWEQGFNTLPPTVLSNADLQQLDVVLSISNHRVLRKGGIRLENLSYDSTELANYRKQFSHKVSQEVLIKLNPDDISYIYVYLDKLEHYIKVPCIDPNGYTQNLSLNQHKINIRIHRDFISGSIDNVGLAKARMFIHNKIQNEFEELKNAPKHSKVKGGKALAKHQNVSSDSQKSIAQSEPLEPKKVTPKEQPTDSWDDFISDLDGF

SEQ ID NO: 1856 - protein, 333 aa, Pseudoalteromonas sp.
MLTDKQKAKLNEFRDVFIEYPIITTVFNDFDRLRLGKGLAGEKPCMLLNGDTGTGKTALIKQYKERHLPQFINGVMNHPVLVSRIPSNPTLESTLAELLKDLGQVGSTERKLRINGTRLTTSLIKCLKTCGTELIIIDEFQELIEHNQGKKRREIANRLKYINDEAGVSIVLVGMPWAEKIADEPQWSSRLLVRRQLPYFKLSENPKHFVQLIIGLANRMPFTEKPKLSEQATVFALFSLSKGCFRTLKYFLDDAVLYALMDNAKTLTTKHLVKAFGVLFPDVPNLFTLPVAEITASEVERYSLYKLESAQDEDPFIATKFTDQMPISQLLRK

SEQ ID NO: 1857 - protein, 391 aa, Pseudoalteromonas sp.
MHFLVQTKLYPDEALESYLLRLARDNSYDGYSELADILWQWLVEQDHDLEGALPLELGKVDVYHARQASSFRIRALKLVAQLADVNAGNILALAWRRSNFKFGNLVAVSRNEQTIPLELLRTDNIPVCIECLFESSYVPFHWHLKPYKTCHKHKSQLTTHCKECHNLIDYRASEEFLECSCGCKLTNSEQLNDADFKIAFALASSNSHKIVGLISWFAKVKQLDVSDADFNRTFVDYFSTWPESLTTELDLLTNNARLKQLNPFNKTKFNSVYGNVIRDGQIAATSNRKNKVLDELIKYFVELVDSNPKTKHPNIADLLLCTFDTAVLLNTTTEQVYRLHQEGFLNCAYPQKKHEQLRADSHVFYLRQVIELQQAFAAETPQTKKQFIAPW

SEQ ID NO: 1858 - protein, 683 aa, Pseudoalteromonas sp.
MNLQDAFAIESLKEKTTALRKLFTPYMSHVAVDGFEEQALTVLINLVYKRSEIDDLTSTRTAKSVLRDEVLLSKCINEVKWFHTHNLKYPDIRVSHQRLISKVVSEDIAGICSRSLPLSFGWSHNSAEINHAKLFLTSFTWQGEVTCLANLLINEEPVWINLIRTYGFTKKAVLGIAGKIKQLLPVAELPLEVSSFSPQLQMPFQQSYLAVTPVVSHAMLAKIQQLTTDRKLNFGLVEHSRPANVGDLASSVGGNIRVLRYFPKTYSKAVNCSEVFNNDSEKAFKIRALLNSQFQQALLVLVGIKQFNTLRQKRLARVAAIRQVRVSLQLWLDNILEAKNNAQGQAYPEWAKHYLDQSITNCISQFSNVLNESLGNLSKLKRFAYHPNLMGVFKTQLNYVFTHCIPDEETLNDEQIVYVHCQDMRVFDAEAMANPYIQGMPSLTALNGLAHNFERKLKNFIDPSIKCIGSAINIESYQLHTGKPLPEPSKLKQVAGRSHVIRSGIIDKPKCDITLDLVFRLFVPNIKLLDKLNSQLVKPALPSMFAGGTMHPPSLYQNIDWCHLHTKPSELFKNIKAKSLNGSWLYPSKKVVKSFEQLIDALNGNFNLRPAAIGFAALEEPIKRDVALHEYHCYAEPVIGLLECVSNTSVKYAGAKQFFHDAFWVMDVQKESMLMKKSKFEYE

SEQ ID NO: 1859 - protein, 342 aa, Pseudoalteromonas sp.
MQLPRHLSYTRSLSPSKAVFFYKTSESDFEPLQIEQNKLVGQKSGFGDAYQKQNVAKNLAPQDLAFGNPQTIDVCYVPPAVNELFCRFSLRVEANSNEPHVCDDPKVIYWLKRFFETYKKHNGLNEVATRYAKNILMGNWLWRNRQSPNVDIEILTEHAAPIIVEGAQKLKWQGNWQNNQTALITLSEAIQEGLSNPQNYCYLDITAKIKNAFSQEVHPSQKFVDNVEQGMSSKQLAYTQVGDKKAASLNSQKVGAAIQTIDDWYEGGYKPLRTHEYGADKQILVAHRTPKSHSDFYSLLPRIALHIKHMEKHGLEQSEESNAVHFIAAVLIKGGLFQRSKA

SEQ ID NO: 1860 - protein, 199 aa, Pseudoalteromonas sp.
MKRYYFTITYLPKNCDVSLLAGRCIGILHGFMSSREISNIGVCFPKWNEQEIGNELAFVSTDKKQLTNLSQQSYFEMMAQDKLFGLSKILEVPTNQNEVMFIRNQSVAKAFVGEKQRRLKRAKKRAEARGEVYNPEYQFEAKDIGHFHSIPVSSKANGQSYVLHIQKIENTNATENQFNNYGFATNQTFQGTVPSLNTQ

SEQ ID NO: 1861 - protein, 210 aa, Pseudoalteromonas ruthenica
MYRRNPKSSRVKHQFKFASQKSKNTCFAESALEFDACFHFEYSSAIVAFETQPLGFKYDFEGRTCPYTPDFLLTHSDGTQKYIEIKPVKELAKDEFRQRFEQKQLASKQLGIELILVTDKQIRVFPVLDNLKLLHRYSGFQVLTELHTVVVGLVKSTGLVKVAQLVNYLKVSAGEVLSIVARLLCIGQLATDLTTDALSLDSVIWASDEQ

SEQ ID NO: 1862 - protein, 612 aa, Pseudoalteromonas ruthenica
MNSKSLGLFDDEFQHPIPQVEAPKSTKAEKDLSAYPQEIQQTTYARLKYIRWLKERIVGGWTEKNLAPLINEMPKVEGADKPNWRTAARWFKSYSESDESIFALIPKHQKKGKRTQRTDTDKFFEKALERFLVKERPSVSSAYQYYKDLVVIENEKVIGEDLRPLTYKAFKNRIDKLPHYEVLRARYGKRIADLAYNKVESHKRPTRVLERVEVDHTPLDLILLDDELQIPLGRPTLTILIDVYSHCIVGFYLGFNDPSYDAIRRAMLNAMKPKNWIKEQYPDITHDWHCCGKIETLVVDNGVEFWSNSFESACAQIGISLQYNPVGKPWLKPFVERIFGVINTQLLDPIPGKTFSNMMKKEGYDPNKDAIMRFSAFMEVFHHWIIDVYHQEADSRFSYIPALEWDRGYEQLPPAPLSSDDIQRLEIVLGISTWRHIRKGGIHFENLRYDSNELADYRKRFSPKASVKLMLKVNPEDLSRVYAFLPELDHYIEVLCIDPNGYTAGLSLHQHKVNVRLQRDFIGSHMDVAALARARMLIHEKIQNEVELLANSTKKPKARGGKALAKYQNVASDNLVSVKPSSPTKKPPEKVETEEAQNKGDWDDFVSDLEGF

SEQ ID NO: 1863 - protein, 333 aa, Pseudoalteromonas ruthenica
MLSEIQTQRLNEFIDVFIEYPLMTTILNDFERLRTGQKLAGEKQCMLLTGDTGCGKSSVINHYKNKHPACHIDGVYHHPVLVSRIPSRPTLESTIAQLLSDLGQVGAAKRKLKRNDANLTDSLITNLKSCGTELIIINEFQELVESNQGKKRNEIANRLKYLNEEAGIPIVLVGMPWAEQIAEEPQWSSRLMVRRFIPYFKLSKDLTLFVRVLMGLATRMPFRDKPRLQEQDIVYALFAVSKGCFRTLKYFLNEAVKQALMYGSETLTKQHLSAAFEVFYPGIEDPFKLSVDEITACEVESYSVYHTDSSSDNEAHNRTRFTEKMPINQLLKK

SEQ ID NO: 1864 - protein, 392 aa, Pseudoalteromonas ruthenica
MHFLVQTKPFRDETLESYLLRLTRDNAYTDYHELADIIWQRLVECDHELEGAFPLELKTANLYHASQSSCFRVRAFKLVAQWAALEPLELIRLSWLRSNTQFGHLSALIRDQLLIPRTLLRESHIPVCLSCLKEEGYIPYYWHLKPYKACHKHKMQLQSHCAECGELIDYRASERFSQCNCGAKLKTTAPASEADIAVSEGLSGADAHDLVGKLTWFAYQYGQDQEHASFNEAFIAYFKYWPDNFFAELDEKASRAREKQLRPFNHTKFDSVFGDVIKVSKVAGPNVLRTNIIVDSLLEFFSDLVEKNPKQKHPNIADLLVNSSDAATLIGTTLEQVFRLYQEGQLTCCERLNKNERLQPDRCVFYLRQVVELAQSQGRYVGDFKNQLITPW

SEQ ID NO: 1865 - protein, 693 aa, Pseudoalteromonas ruthenica
MDLAEALAIKSVREKSDALRKLFAPYASSVAVDGYEQQVATVLINLVYKRNEQIDLASIKAAKDVLKDTELMAKCISEVKWFHTHNLKYPDIRVSHQRLIAQVIDKDIPAITSASLPKLLGWSHNSAEINHAKLFLTSFKWQGEVNNLAGVLVDEHPAWIEAMRNLGLTKKSVMALATHIRELLPATDLPGEVSEFTPQLMMPYGKDYLSVSPVLSHAMLVRVQQLARDKVVNWGVVEHTRPANVGDLPSSLGGNVRVLRYFPATSLKGSLGEYIENDPNERLFKHKVLTSKSFKTSLIILTGKSVYNTLRQKRLARIAAIRQLRSTLMHWLDKIIEFQNNGNHNLVPEPMKSFIENLKPNLNGVVCELSGLLNEQLSSHHSLKKFAYHPDLMSVLKRQLQYVLTHGETVDETLVDSQILYVHCKGLRIFDAEGMPNPYLQGIPSLTALAGVAHKFQRKLQSIVDPSIECIGSAIFVHSYQLHTGKPLPEQNQLKTNQGITSAKRPGIVDKPKCDMTIDLVFRLFVPHESTRTQLTDNMFKAAFPTSFAGGTMHPPSLYETVEWCQAFTSPTQLFGELSLLPSRGCWLYPSKHQVRTFEDMVELLDADPNQRPAGLGFASLEQPTQRKEALGSKHCYVEPAIGLLECVNPITTRMGGAKAFFHNAFWVIGVEKTSMLMKKAKFEYTQCDSRDT

SEQ ID NO: 1866 - protein, 342 aa, Pseudoalteromonas ruthenica
MRLPRHLSYTRSLSPGKAVFFYQTPESDFEPLQIEQNKLIGQKSGFTDAYQKLGEPKSLAPQDLAFGNPQTIDVCYVPPTVNEIFCRFSLRVEANSVEPYVCDDRKVSYWLKRFVETYKEHGGFKELASRYAKNILMGNWLWRNKQSPGFDVEVLTEHSEPIVIEGAQRLKWNGVWGNDEAALATLTEAIENGLANPQAYCYLDITSRIKTAFCQEIHPSQKFVDNVEQGMSSKQLAYTQVDGKQVASLNAQKVGAAIQTIDDWYTEDLKRLRIHEYGADKQVLVAHRTPKNGLDFYSLLPKVAVYIRHMERDGLEDDEESKHIHYLASILLKGGLFQRSKG

SEQ ID NO: 1867 - protein, 201 aa, Pseudoalteromonas ruthenica
MKRSYFTVTYLPINCDYSLLAGRCIGILHGYLSRFELDGIGVSFPKWNEETVGNQIAFVSESESHLQTLRQQNYFQMMSHDGLFKLSVTRTVPEQVDEIQFVRNQSISKAFVGERRRRMVRAKLRAEARGEEYNPIYEFEPTEIEHFHSIPITSKSNNNEFVLHIQRRECSGTAGGFNKYGFATNEHHLGTVPSLSGLLIS

SEQ ID NO: 1868 - protein, 209 aa, Photobacterium ganghwense
MYRRKLKHSRVKNLFKFVSAKMNQAMTVESYLEFDTCFHLEYSSSIISFAAQPEGFIYRIDGRDCSYTPDFQILENEEVKWIEVKPFVKTQRPDFLQRFKVKQEKALALGVPLILVTEKQIRVNPVLNNLKILHRYSGFQSLTDLHIRLLSLVKTVGKISVSDAACRLGIDQGMMVKSAFSLVSSGMLTADLVHDELGLHSIVWSEHNG

SEQ ID NO: 1869 - protein, 622 aa, Photobacterium ganghwense
MAKDISTGLFQDEMAVASSSEPVEALPSSTDDFFERDLASYPDEIQIEVRRRIEYLQWIEKHLVGGWTQKNLDPLIEKAAREIDFPPPKWRALAKWWSVYSSSGKMLASLVPKLHRKGNRNLKITNELSFFDRAVERYLVPERPSISAVYQYYTDLIRIENQHLVGEKVQALSYKGFYNRIKKLPAYEVAVARHGKYLADMEFNKIDAHQPPSRVLEKVEIDHSPLDLILLDDELNIPLGRPYLTLLIDQYSKSIMGFHLGFKEPSYYSVMKAILNAIKPKDDIAERFPGVVHDWYCQGKMESLVVDNGAEFWSKSLEQSCLEVGIHIQYNPVRKPWLKPLVERIFRTIGSKLLVTIPGKTFSNILAREEYDPRKDAVMHFSVFNELFHKWIIDVYHYESDSRKRAIPYVKWQEGVVVMPPISYEPEDLEKLSVVLGIKELRKHRRGGIHLHGLRYDSEELADYRRMYSRDIDVLTKTNPDDISSIYVYLEHKQQYLKVPCIDPIGYTKSLSLTQHHINQRLHRDFIDSQLDLEGLARVRMYIHDRIEQEADEIKNLNRGRPRRTTKGMARLAKHNGVASDVQTSCVPETLPELSMPDKGKESKQLPDSDEWDDFISDLEPY

SEQ ID NO: 1870 - protein, 338 aa, Photobacterium ganghwense
MDSLSPEDEAKYQAFVDIFVEQPIATMVMADFDRLRYNRQFGGDQQCMLLTGDTGSGKSFLIKEYCRRLAQTNPMKQALVLSSRIPSKPTLESTIIELLKDFGHFGATYRKGKSKDQSLTVSLIKCLKASCVELIIINEFQELVEFKTGRALNEIATRLKHISEEATVPIVLVGMPWAAKIANEPQWASRLLIRRELPYFKLSEEPEHFIRFIKGLAARMPFTELPKLDNKQTILALFSASNGQTRRLKQLLNEAVKLALVQNAVTLTNEHLADVFRMIFPAIPNPFLASIEQIEGQEVSLPSHYDSGADNEFEAIIPTQYTDRLPLSQLLRKSRKTK

SEQ ID NO: 1871 - protein, 405 aa, Photobacterium ganghwense
MFLIHPEKHYQDESLESFLIRLCECNGFESFRLLSGALWEWLVDNDHQAAGALSRQLCEINLYHAKHSSGFRVRAFELLDSLFKGNARPLMQHALLHSAVTFSPNLTSVFRAGIHIPRCFLRQSYTPVCPACLTEAPYIRQYWHLKPYQSCHRHGVAMLFHCPSCSAVLNYQDTEQIETCSCGFDLRDAGTNVASSEQIAISQLVVEGEMQNALSISHWLGALLWFYRYKQSQLSLNVVKEPEFGRAVEYFSQWPNAFVRDLHELATQAEMKLVRGFNHTRFSEVFGDLLSSSRKLPSSDTQQNFILKAVIDFLQQLVRDNPKAKETNIADVKLTVVEAAALLTTSTEQVYRLYEEGYLQSSVRFKLHSKLSPNDAVFFLRHVVELRMAGMASDYSANDVYLPSW

SEQ ID NO: 1872 - protein, 691 aa, Photobacterium ganghwense
MVRSMHLSELLLVQDTEERNQLLRKALAPYTCLVDVTGYERQLLMIAINITVPRKDVDDVLDKKLAKSLLTNTKHLQRCIDEVQWFHTHNVKYPDSRVKGQRIISLKQDEVDGVLCSANLPSSLGWAHNSSQVNPAKFFSIRFIWQGRAMSLLETVIDAPSEWKVAFRSLGIIKKQLSEFREIFSTYYTSSQIPSEVSDYSTQIRVPYQGYYCALTPVISHSVQSKIQKMAFGRKVKSSNVEHHHPASVGSLVAALGGNIRVLDYPPNVRQKTSEAFSLYRAVSEKEVFDHSIIKEKRFLDALSRIAGENPTPTLRQRRQLRVSALRFVRKQLALWLAPMMEWRDSIGGESRHSPIETLEEQLLYLPIAHLPDVLSDLNTRFHQALQYHRRGARYAYHPEVLFPIKQQLKWLLRYMANQQDALITPEPNCVYLHLQQLVVHDASLLSNPYVSGIPALTALGGLMHNYQRRLSALMECECLIQRGAWFIAHYHQQKIKKLPEPDKVRYLKKRSDVQRPGITDGKYGDLTMNLVLELQLPESVSIPELSLLQAAFPSRFAGGTLHPPSLFEQTDWLSVYSNQSELFSVLARLPRSGCWVYPDDKGVSSFDELASRLDNDPDLKPVGLGFIPLEEPHCRVGSIAPYHCYVEPCIGVVRCMNPINVRLSGSQQFYQSAFWHFDIANDAMLMKKAT

SEQ ID NO: 1873 - protein, 344 aa, Photobacterium ganghwense
MQICRHLNYVRSLSPGKAVFYYQTPESDFVPIQVETNRIRAAKSGFTEAYDKNQNLKNVAPQDLAYSNPQCIDACYVPPNISEIHCRFSLRVEANSLQPDSCEDQKVRRYLIQLASIYAQVGGYQELAKRYCKNILMGTWLWRNNHTLGTRIDVITSSGRCYAIDDARYLDWIDWPEEEQVMLNDLASEMAAALCEPKQFWFADIKATLKTGFCQELHPSQKFTDSHEQGESSKQYATVECPNGIQAACFHAEKVGAALHLIDDWWDEVADKRLRTHEYGADRDYLIARRHPMKKQDFYSLLTLTAVFIRQLRNVRDKGGEIPPQVHYLMAVLCKAGMFQRGKS

SEQ ID NO: 1874 - protein, 207 aa, Photobacterium ganghwense
MANRFYFLIRYMPEDVDEGLLAGRCISILHGVLSSDQNDIDGGIGVVFPQWSCTSLGRSIAFVSDNQRHLEQLSQQHYFAVMKGDNLFDISHIQAVPSGLSEIRFKRNQGIAKCFAGEKRRRLARAKRRAEARGEVFNPKHGMSDREVSLFHKAVMTSKSTGQKYLLHIQRETVTGSSVSQYSQYGLATNIECMGTVPDLSPIIPFF

SEQ ID NO: 1875 - protein, 209 aa, Shewanella sp.
MYIRNLRKPSPNKNVFKFASAKVSETIMCESTLEFDACFHHEYNETIETFGSQPKGFYYCFEGKRLPYTPDALLHYIDGTTKFHEYKPYSKTFDPIFRAKFVAKKEAAQALGTELILVTDKQIRVNPILNNLKLLHRYSGIYGVTDIQRELLQLIRHSGKIQLDDVADEYELSVGETRSFLYSLINKGLLEADLTQDDLSCNPFVWCNA

SEQ ID NO: 1876 - protein, 617 aa, Shewanella sp.
MIEFKDEFTESTSVKKPDTPGQYIKLDDAEILKRDLDTFPDFLKEKAFDKYKLISFIEQENSGGWTQKKLDPILDKLFEGNRDKRPNWRTVVRWRKSYIDSNGDLASLVVKRHKMGNRKKRVEGDEVFFERALSRFLDAKRPKVTTAYQYYKDAITIENETIVDGEIPIISYTAFNQRIKSLPPYPIAVARHGKFKADQWFAYCSSHIPPTRILERVEIDHTPLDLILLDDELQLPLGRPYLTLIVDVFSNCVLGFHLSYKAPSYVSAAKAIVHAIKPKTLGIVGIELQNDWPCYGKFETLVVDNGAEFWSKSLDHACKEAGINIQYNPVRKPWLKPFVERFFGMINQYFLTELPGKTFSNILEKEDYKPEKDAIMRFSVFVEEFHRWIVDIYHQDSDSRDTRIPIKQWQHGFDVYPPLQMSVEDEKRFNVLMGITDERTLTRNGFKFEELMYDSTALADYRKHYPQTKDTIKKLIKIDPDDLSNIHVYLEELEGYLKVPCTDTTGYANGLSLHEHKVIKKINREIIRESKDNLGLAKARMAIHARVQQEQELFNESKTKAKISAVKKQAQLADISNTGQGTIRLENSDTLSDITNKPESNISDILDNWDDNIEGFE

SEQ ID NO: 1877 - protein, 343 aa, Shewanella sp.
MNTLTAHQMEQLGRFNDCFVMHPQAKVIFNDFDDLRLNRNFQSDQQCMLLTGDTGVGKSHLINNYKKRVLASQTYSRTSMPVLVTRISSHKGLDATLRQMLTDLESFGSQQRKGQNYKIDLKTQLVKNLVRANVELLIFNEFQELIEFKTPKERQTIANELKFISEEARVPIVLVGMPWTEQIAEEPQWSSRLIRRRKLEYFSLQKDSKYYRQYLIGLAKHMPFDEPPKIEDKHIAIPLFAACRGESRVLNHLLSETLKLVMVNGDRSLDIRHLAQTYRKLYESQESEAASVFFNPFLEPLDKVLISEVVKPSRYNPNAMTPDEMLIKREFSAPSTLAQLLSK

SEQ ID NO: 1878 - protein, 411 aa, Shewanella sp.
MAFLFSPKARSFSDESLESYLLRVVAENFFDSYQQLSLAIREELHELDFEAHGAFPVELKRLNVYHAKHNSHFRMRALGLLESLLDLPPHELQKLALLRSNKRFVGGMSAVHRNGVDIPLSFIRCADEDGIESLPICPQCLKEEPYIRQAWHIKPIEVCAKHECELIHHCPDCQQPISYIENESITHCSCGFEFATASSEKADSQAVVLSRSLFDGDALSNNPLLFMGTSVTHRFAALLWYLKRHVQNIECKLDESVNYFEAWPENFYQELDELLAGAELKLIDLFNRTSLSFIFGELILQSQCLLPEDKTPHFIDMGLMEYLGKLVESHPKSKKPNVADMLVSVTETAVLLSTSHEQVYRLYQDGVLTAGFKQKIRTRIDPHIGVFYLRQVIEYKTSFGNDKQGMYLSAW

SEQ ID NO: 1879 - protein, 699 aa, Shewanella sp.
MVDKLKFHELLDIDDISERNIALRRAFTGYTVPMDVTGNEASALTILLNLTYPRKRVDDLLDKRLAKQTLNTDAHLDASIDEVQWLHTHNLKYPDIRVSKQRLITASPLSHSHILSSANCISTLGWSHDSAKVNLAKLFSCHFNWQDRVCCLATLLSDPPKIWKEAFQALGMLVKDFMNLCGRIKASLPSYESPSRVDKYSIQVRLPYRDGYLAITPVVSHALQAEIQQAAMAKQCRYTNFEFTRPAAVSELSASLGGNVKALNYPPRIGNAVHGLSDSWLLKFQAGQTVLNQGALSQPRFKRALEGLLSNGFELALKQRRLHKVASMRQIRATLTEWLSPLLEWRLEVEENKNNVSELACIHGSFEYQFLTAQKENLVGLLNPMFSLLNTILSNSNTLQKYAFHQRLMRPLKCSLKWLLDNLSKESNAIDSDEDNQQRYLYLKGIRVFDAQALSNPYCAGLPSLTAVWGMVHNYQRRLNKRLGTQLRLTSFSWFIRQYSSVAGKKLPEYGMQGQKENQFRRAGIVDNKHCDLVFDLVVHIDGYEEDLDAIDNSTDAIKASFPATFAGGVMHPPEIGSVDEWCELYPSETSLYSKLRRLPASGKWVMPTRYQMDSLDGLLQLLKLNVALCPVMSGYLMLGPPESRKNSLEPLHCYAEPAIGVVECATAIDIRLQGMSNFFRRAFWMLDIKETSMLMKRI

SEQ ID NO: 1880 - protein, 365 aa, Shewanella sp.
MELCNVLKYDRSLYPGKAVFFYKTAESDFVPLEAEINRIRGQKAGFTEAFTPQFKSKNLAPQDLAHCNPLILEECYVPPNVEYIYCRFSLRVQANSLKPAGCSEPTVFALLEEFAAIFKACGGYKELATRYCKNVLLGTWLWRNQNTGNSQIDIKTSAGNCYQIANTRQLAWDSRWPADAQQVLEELSDEVHQALTDPTVFWHANITAKIETAFCQEIYPSQSFGEKAAQGEASKQFAKVKCVDGRYAVSFNSVKIGAALQLIDDWWDVDDSKRLRIHEYGADKELGVARRAPESKQSFYSLFINTELYLAELNQQLAEDEYSISPNIYYLFAVLIKGGMFQKKAEAKSKSKAETSTAKITPAKA

SEQ ID NO: 1881 - protein, 199 aa, Shewanella sp.
MHRYYFMVRFLPEQANLALLMGRCISIMHGFICKHDIQGLGVSFPAWSDASIGNMIAFVHTDIAALNELKLQGYFQDMQECGVFKVDNVEAVPDDCVEVRFKRNQGIAKMFVGEARRRLKRLEKRALARGEVFNPNKNDEPRELDCFHCIAIGSTSTEQDFLLHVQKEIVQKYEEPEFNQYGLATNKLLRGTVPEFSEF

SEQ ID NO: 1882 - protein, 207 aa, Vibrio cholerae
MYVRNLRKPSATKNVYKFASSKNRSVILCESSLERDCCYHLEYSKDVFSFQSQPEGFYYSSGNKRCPYTPDFLVRNQDGSEYYLEVKPLAKTFSEDFKRSFALKRIAAQHQGKPLVLVTDKQIRNGVYLENLNLIHRYSGLVDFSLSSTKIVEELSTAGRMCIRSLADNLKLSIGEVIAVVFRLIGLGRVNVPLDSAINEMSVISVN

SEQ ID NO: 1883 - protein, 635 aa, Vibrio cholerae
MPFDDEFESINDDTQAEYDSTSEAKLVRKQYLPLDSVTIHERDLSSFSEEQKNKALERYKLISAVAKEISGGWTPKNINPLIDKYGLNLSIKRPSYKSVIRWYKSFCGSDGNIVCLVDHNHSKGNRTKRIIDDESFFVEATERFLDAKRPNYSQAYQFYCDRIEIENSNIISGQISKVSYQAFKERLKKLPPYEVALKRFGQNYANKLFNYYQSSVPTTRILERVELDHTPLDLILLDDDLLIPLGRAYLTLLVDVFSGCIVGFHLGFNPPSYVSVAKAIIHSVKSKDYVHDLNIELTNDWLCHGKMETLVVDNGAEFWSKSLDQACMEAGIHYEYCKVGQPWEKPRVERKFLEIIQGIVGWVPGKTFSNILEKDRYDPQKDAVMRFSSFVEELHRWIIDVHNASPDSRNTKIPNYHWKKSEEALPPAALSDRDEKQFRIIMGVIHEGVVTTKGIKYKHLMYDNVALEQYRKQYPQTKKSRKKTIKIDPDDLSSIFVYLEEIGGYIEVPCKYDPLGYTKNLSLSEHVRITKIHRDFIKGQVDALSLAKARQALHERIKTEQEHLSLMSVESRAKKAKHGKKMAALSGISNEQPMSIQNALENKNKPLDDNFDEPTPVDNLKSLWNKRKAMKRSKE

SEQ ID NO: 1884 - protein, 328 aa, Vibrio cholerae
MNLSAKQEIAVDELLTQYHNSFVIYPDVQQIFDGLDWIVRRSQFGNFTPSMLITGGTGAGKTSLINHYAKYHFNDNEVLITRVRPSFIETLIWAIDKLGIPYNTRSKRSEIGLQDYFINSVKKSNLKLLVIEEAQELFECASPKERQKIRDRLKMISDECRLPIVFIGIPTAKLILEDSQWDRRIMVKRELPYIRITSESSLDVYIDLLEELEKQLPISVQPELSEMDIAMRLLSATKGMLGAIKELVGYALELALLSGKSAITNDEFALGFERINGPDVTNPFTTELEKLLVPQVIEYEGFIIDPENGEIKFTKQIFKDIPLAALLG

SEQ ID NO: 1885 - protein, 403 aa, Vibrio cholerae
MNTDIQLYPDESLESFLLRLSQEQGYERFSHFAEDIWFDTLDQHEAIPGAFPLELNRINIYHAQTTSQMRVRVLIHLENQLKLNNFGALRLALSHSKAQFSPEYKAVHRLGADYPFVFLAKRFTPICPLCISEAPYIRQQWQFLSQQVCERHGCKLVHHCPECQSRLEYQTTESISQCECGFELRNSPVADAPVAALLVARWLSGNDSKPLGLLKAEMTPSERYGFLLWYVNRYGDIENISFESFVEYCSCWPRVLQEELDELVNKADLIRIKDWKKTFFNEVFGALLKDCRQLPSRQLERNSVLTQVLAYFTKLMATLPSSSKGNVGDVLLSPLEVSTLLSCTTDEVYRLYEFGEIKAAIRPRMHTKIASHESAFTLRSVIETKLTRMCSENDGLSVYLPEW

SEQ ID NO: 1886 - protein, 695 aa, Vibrio cholerae
MTKLSDLLAIEDEAIKQTALKKMFMPYTEDVCVDGYEQETLTILLNLSSSHQADRCSDWLDVARAQRYLKDRENLDASLAEIQWFHTHNLKFPDCRVKDQRIIARPLSTAEEFISSAVLDQRLGWAHNSAVYRHTLWLLNPFKWQSQPVCILSLIQQKNPVWLDLLTEFGLDVKSLARLQRAIEEQLPENSFPDSVSTYSKQLRFPLGDDYVSITPVVSHALQCELEIRARSPENKFSFVSSSLPNSASIGNLCGSLGGYMRVLNYPLGVKQAKGGTLTENRQKSGHYFDDYQVTNAKICQVLNRLIGSEPSKTQRQRERARKVRSKILRKQIALWMLPLIELRDIAESEPNQQQLEHDDTLAQAFLSLPEWELGSLAGEFNRRLHLAFQNNIYSAKFAYHPKLMQVAKAQVTWVLEQLSKPINNQDTLTGEQYIYLSSMRVQDAVAMSNPCLCGVPSLTAIWGFMHDYQRQFNQLVNNDSPVEFSSFAFYVRNENIQSTAKLTEPNSVAKARTVSNAKRPTIRSERLSDLEIDLVIRVHSESRISDFRSALKTALPVAFAGGALYQPQLSMQIEWLRTFTGRSELFHVLKGLPAYGRWLYPSEKQPTNFDELERLLTQDDDNLPVSLGYHLLEHPTKRGNAITGCHAYAENAIGLAKRINPIEVRFSGRDHFLNHAFWSIECSSETILIKNYRD

SEQ ID NO: 1887 - protein, 343 aa, Vibrio cholerae
MELCTQLNYVRSLSAGKAYFYYLSESGEMCPFNVDRTRLRAPKGSYSEAYKGNKFVDKNVAPQDLAYSNPQFIEECYVKPGVDEIYCAFSLRIRANSLTPDICSDDEVRSKLSMFAKIYKELNGYKELANRYAKNILLGTWLWRNRECRNITIEVTTSELDTFVVEHAQKLSWYGHWDGDSTECLERLTAYLERALSDPTEYFYMDVKAKMRVGWGDEVYPSQEFLDSREDGIPTKQLATVELLSGKETVAFHGQKVGAALQSIDDWWHEEADKPLRVNEYGADREYVIARRHVAYGNDFYQLLRNTENWIESMTASESIPNDVHFIMSVLIKGGLFNCAKAN

SEQ ID NO: 1888 - protein, 212 aa, Vibrio cholerae
MSQRYYFLIRYTNANADYGLLAGRCISQMHLFMVNHHQAMNRVGVSFPDWNESSVGQTIAFVSEDKEMMIGLSFQPYFSLMVNEGLFEISSVYEVPDTSEEVRFVRNQTIGKNFLGSKKRRIKRSMARAELFGIQQSLPVTNEDRAIDSFHQIPISSGSSRQDYILFIQKELADERAESGFNSYGFATNQEKRATVPDLRFNPFDEDSFLVQ

SEQ ID NO: 1889 - protein, 207 aa, Vibrio cholerae
MFDQTKKSSHVHNICKFMSLKNDAVVRTLSILEFDFCFHLEYNPNIKSFTSQPFGFHYLFNNRKCRYTPDFLAIGHNEQSTFFEVKHSSQIPKPDFRERFEEKQRVALSEFNRRLVLVTEKQIRMGPTLDNFKLLHRYSGLRTVTEFQKRVLAFIQRKQMVKLQEVSLYFGLSEQDTLISTLPWISSGHVKTDLNTIGFGLETCVWC

SEQ ID NO: 1890 - protein, 621 aa, Vibrio cholerae
MPPDSNSIFGFFDEFEASEEESQLLPKELILEPVEISSTIDSLPAKIQEEVLRRIKVITFVEKRLKGGWTEKNLNPILSLVESELQLTPPSWRTVATWKKSYAEAGREASALIPKHTFKGNRQKEMDSQSLIDEAIQNVYLTRERLSVAEAYRYYKSRVIQMNRGIVEGKIKPIAERSFYNRINELPPYEVAIARFGKRYADREYRSVGQQVVATKPMEFVEIDHTPVPVILIDDELDIPLGRPYLTMLYDRFSKCIVGCSINFREPSFDSVRKALLNSLLDKSWLKAKYPSIENEWPCHGKIDCLVVDNGAEFWSQSLEDSLRPLVSDIQYSQAAKPWRKSGIEKLFDQMNKGLVNALPGKTFTNPTQLQDYNPKKDAVVRVSVFLELLHKWIVDYYHMAPDSREREIPYHKWHQSKWTPSYYDGAEKEQLRVELGLLRHRTIGVAGIRLHNLRYQSAELIEYRKYCTPNNGKQLFVKTKTDPSDISYIHVYLESEKKYIKVPAVDNSGYTNGLSLFEHQRIQKVRRLNTKDLADDEALADTFLYMKKRIHEETDRFRRVKSSKPNLPKTGNTSRLAKFNDVGSEGPNSINVTPVRLKSEVVSDASEYLDDDDFEDIEGY

SEQ ID NO: 1891 - protein, 365 aa, Vibrio cholerae
MTMILKILKGISLNLTPKQLEQLKSFETCFIEYPAITEIYSIFDQLRFNHSLGGEPESFLLTGEAGSGKTALINNYLSRFQSGSTWGKQPVLSTRVPSRINEQNTLTQFLVDLDCKSGGRGIRRRNEIALGEAVVKQLKRKSVELIIVNEIQELVEFSTAEQRQVIANTFKYMSEEARVSFVLVGMPYADVIATEPQWNSRLSWRRKIDYFKLLKANSHSSKTASYGFDLEQKKHFARFVAGLSSRMGFDEPPVLTKNELLYPLFAMCRGECRALKHFLKDALLTSFNDNADTIDKAILSRTFAFKFPYLDNPFDRPLEQLSLHQIDSGSAYHLNAITTEDKIVAPRFTDAIPLSMLLSKNGLKA

SEQ ID NO: 1892 - protein, 403 aa, Vibrio cholerae
MKTDIQHYSDESLESFLLRLSQEQGYERFSHFAEDIWFDTMEQHEAIAGAFPLELNRINIYHAQTTSQMRVRVLIHLENQLKLNNFGVLRLALSHSKAQFSPEYKAVHRLGSDYPFVFLGKRFTPICPLCISEAPYIRQQWQFLSQQACERHGCKLVHHCPECQSRLEYQTTESISQCECGFELRNSPVEDAPVAALLVARWLSGNDSKPLGLLKAEMTLSERYGFLLWYVNRYGDIENISFESFVEYCSCWPRVLKEELDELVNKADLIRIKDWKKTFFNEVFGALLKDCRQLPSRQLECNSVLTQVLAYFTKLMAAIPSSSKGNVGDVLLSPLEASTLLSCTTDEVYRLYEFGEIKAAIRPRMHTKIASHESAFTLRSVIETKLTRMCSENDGLSVYLPEW

SEQ ID NO: 1893 - protein, 695 aa, Vibrio cholerae
MTKLSDLLAIEDEAIKQTALKKMFMPYTEDVCVDGYEQETLTILLNLSSSHQADRCSDWLDVARAQRYLKDRENLDASLAEIQWFHTHNLKFPDCRVKDQRIIARPLSTAEEFISSAVLDQRLGWAHNSAVYRHTLWLLNPFKWQSQPVCILLLIQQKNPVWLDLLTEFGLDVKSLARLQRAIEEQLPENSFPDSVSTYSKQLRFPWGDDYVSITPVVSHALQCELEIRARSPENKFSFVSSSLPNSASIGNLCGSLGGYMRVLNYPLGVKQAKGGTLTENRQKSGHYFDDYQVTNAKICQVLNRLIGSEPSKTQRQRERARKVRSKILRKQIALWMLPLIELRDIAESEPNQQQLEHDDTLAQAFLSLPEWELGSLAGEFNRRLHLAFQNNIYSAKFAYHPKLMQVAKAQVTWVLEQLSKPINNQDTVTGEQYIYLSSMRVQDAVAMSNPCLCGVPSLTAIWGFMHDYQRQFNQLVNNDSPVEFSSFAFYVRNENIQSTAKLTEPNSIAKARTVSNAKRPTIRSKRLADLEIDLVIRVHSESRISDFRSALKTALPVAFAGGALYQPQLSTQIEWLRTFTGRSELFHVLKGLPAYGRWLYPSEKQPTNFDELERLLTQDDDNLLVSLGYHLLEHPTKRDNAITGCHAYAENAIGLAKRINPIEVRFSGRDHFLNHAFWSIECSSETILIKNYRD

SEQ ID NO: 1894 - protein, 343 aa, Vibrio cholerae
MELCTQLNYVRSLSAGKAYFYYLSESGEMCPLDVDRTRLRAPKGSYSEAYKGNKFVDKNVAPQDLAYSNPQFIEECYVKPGVDEIYCAFSLRIRANSLTPDMCSDDEVRSKLSMLAKIYKDLNGYKELAHRYAKNILLGTWLWRNRECRNITIEVTTSELDTFVVEHAQKLSWYGHWDGDSTECLERLTAYLERALSDPTEYFYMDVKAKMRVGWGDEVYPSQEFLDSREDGIPTKQLATVELLSGKETVAFHGQKVGAALQSIDDWWNENADKPLRVNEYGADREYVIARRHVTHGNDFYQLVRNTENWIETMTASRTIPNDVHFIMSVLIKGGLFNCAKAN

SEQ ID NO: 1895 - protein, 209 aa, Vibrio cholerae
MSQRYYFLIRYTNANADYGLLAGRCISQMHLFMVNHHQAMNRVGVSFPDWNESSVGQTIAFVSEDKEMMIGLSFQPYFSLMVNEGLFEISSVYEVPDTSAEVRFVRNQTIGKNFLGSKKRRIKRSMARAELFGVEQSLPVTNEDRVIDSFHRIPISSGSSRQDFILFIQKELADERAKSGFNSYGFATNQEKRATVPDLRFNLFEEDSF

SEQ ID NO: 1896 - protein, 58 aa, Vibrio cholerae
ATGTCTGCTCTACCTTCTCCTTCTACTACCACCCTGATTGCACTTGAAAGTGCATTTG

SEQ ID NO: 1897 - DNA, 3229 bp, Synthetic construct
  source 1..3229: mol_type = other DNA
ctgtcagaccaagtttactcatatatactttagattgatttaaaacttcatttttaatttaaaaggatctaggtgaagatcctttttgataatctcatgaccaaaatcccttaacgtgagttttcgttccactgagcgtcagaccccgtagaaaagatcaaaggatcttcttgagatcctttttttctgcgcgtaatctgctgcttgcaaacaaaaaaaccaccgctaccagcggtggtttgtttgccggatcaagagctaccaactctttttccgaaggtaactggcttcagcagagcgcagataccaaatactgttcttctagtgtagccgtagttaggccaccacttcaagaactctgtagcaccgcctacatacctcgctctgctaatcctgttaccagtggctgctgccagtggcgataagtcgtgtcttaccgggttggactcaagacgatagttaccggataaggcgcagcggtcgggctgaacggggggttcgtgcacacagcccagcttggagcgaacgacctacaccgaactgagatacctacagcgtgagctatgagaaagcgccacgcttcccgaagggagaaaggcggacaggtatccggtaagcggcagggtcggaacaggagagcgcacgagggagcttccagggggaaacgcctggtatctttatagtcctgtcgggtttcgccacctctgacttgagcgtcgatttttgtgatgctcgtcaggggggcggagcctatggaaaaacgccagcaacgcggcctttttacggttcctggccttttgctggccttttgctcacatgttctttcctgcgttatcccctgattctgtggataaccgtattaccgcctttgagtgagctgataccgctcgccgcagccgaacgaccgagcgcagcgagtcagtgagcgaggaagcggaagagcatgtggctggggcttccacccatcttgtcgctgaaatcataaagcgtcccaaaaaaaccataaaatgtcccaataaaacccataaagtgtcctaaacttattttggttgtttttttacaacgaaaaaggacatgttatgtacgttcgcaatcttcgaaaaccttcagcaaacaaaaacgtttataagtttgttagtgtaaaaaatggctgcaatatcatgtgcgaaagctcattggaatatgattgttgctactatttagaatattcggatgatgagaagtgtcgcctactcataggatccatggagaaaaaaatcactggatataccaccgttgatatatcccaatggcatcgtaaagaacattttgaggcatttcagtcagttgctcaatgtacctataaccagaccgttcagctggatattacggcctttttaaagaccgtaaagaaaaataagcacaagttttatccggcctttattcacattcttgcccgcctgatgaatgctcatccggagttccgtatggcaatgaaagacggtgagctggtgatatgggatagtgttcacccttgttacaccgttttccatgagcaaactgaaacgttttcatcgctctggagtgaataccacgacgatttccggcagtttctacacatatattcgcaagatgtggcgtgttacggtgaaaacctggcctatttccctaaagggtttattgagaatatgtttttcgtctcagccaatccctgggtgagtttcaccagttttgatttaaacgtggccaatatggacaacttcttcgcccccgttttcactatgggcaaatattatacgcaaggcgacaaggtgctgatgccgctggcgattcaggttcatcatgccgtttgtgatggcttccatgtcggcagaatgcttaatgaattacaacagtactgcgatgagtggcagggcggggcgtaatttttttaaggcagttattggtgccctggtaccgatcgatcctcagtaatagcaaaccttgttacattggcatggttagtcgctgtgatagttagccgtgtgatcaccaagaggtgtggttttctctactgcacttctgcataaaacagtaagtagttttctttcacaattttcctcagtgttaaaccgaagcagaaaataggacacgttatgctttcatcttaggacactatatggttttactgtgttggtaatggattgatttgtaatggagcgttaggacatcttatggtttcagcgacacatctatgtcgctgaaagcataaaggacgtcaggtggcacttttcggggaaatgtgcgcggaacccctatttgtttatttttctaaatacattcaaatatgtatccgctcatgagacaataaccctgataaatgcttcaataatattgaaaaaggaagagtatgagtattcaacatttccgtgtcgcccttattcccttttttgcggcattttgccttcctgtttttgctcacccagaaacgctggtgaaagtaaaagatgctgaagatcagttgggtgcacgagtgggttacatcgaactggatctcaacagcggtaagatccttgagagttttcgccccgaagaacgttttccaatgatgagcacttttaaagttctgctatgtggcgcggtattatcccgtattgacgccgggcaagagcaactcggtcgccgcatacactattctcagaatgacttggttgagtactcaccagtcacagaaaagcatcttacggatggcatgacagtaagagaattatgcagtgctgccataaccatgagtgataacactgcggccaacttacttctgacaacgatcggaggaccgaaggagctaaccgcttttttgcacaacatgggggatcatgtaactcgccttgatcgttgggaaccggagctgaatgaagccataccaaacgacgagcgtgacaccacgatgcctgtagcaatggcaacaacgttgcgcaaactattaactggcgaactacttactctagcttcccggcaacaattaatagactggatggaggcggataaagttgcaggaccacttctgcgctcggcccttccggctggctggtttattgctgataaatctggagccggtgagcgtgggtctcgcggtatcattgcagcactggggccagatggtaagccctcccgtatcgtagttatctacacgacggggagtcaggcaactatggatgaacgaaatagacagatcgctgagataggtgcctcactgattaagcattggtaa

SEQ ID NO: 1898 - DNA, 3229 bp, Synthetic construct
  source 1..3229: mol_type = other DNA
ctgtcagaccaagtttactcatatatactttagattgatttaaaacttcatttttaatttaaaaggatctaggtgaagatcctttttgataatctcatgaccaaaatcccttaacgtgagttttcgttccactgagcgtcagaccccgtagaaaagatcaaaggatcttcttgagatcctttttttctgcgcgtaatctgctgcttgcaaacaaaaaaaccaccgctaccagcggtggtttgtttgccggatcaagagctaccaactctttttccgaaggtaactggcttcagcagagcgcagataccaaatactgttcttctagtgtagccgtagttaggccaccacttcaagaactctgtagcaccgcctacatacctcgctctgctaatcctgttaccagtggctgctgccagtggcgataagtcgtgtcttaccgggttggactcaagacgatagttaccggataaggcgcagcggtcgggctgaacggggggttcgtgcacacagcccagcttggagcgaacgacctacaccgaactgagatacctacagcgtgagctatgagaaagcgccacgcttcccgaagggagaaaggcggacaggtatccggtaagcggcagggtcggaacaggagagcgcacgagggagcttccagggggaaacgcctggtatctttatagtcctgtcgggtttcgccacctctgacttgagcgtcgatttttgtgatgctcgtcaggggggcggagcctatggaaaaacgccagcaacgcggcctttttacggttcctggccttttgctggccttttgctcacatgttctttcctgcgttatcccctgattctgtggataaccgtattaccgcctttgagtgagctgataccgctcgccgcagccgaacgaccgagcgcagcgagtcagtgagcgaggaagcggaagagcgatgtggctggggtctccgcccatctgaatcctgcaatatatgttcgcataaattgcaggctttcttcatatttgcaccataagttttcatagtctatttttttgttgtaggtttacaacaaaagtgattgtgctatgttcgatcaaaccaagaagtcatctcacgtgcacaacatctgtaagttcatgagcttgaagaatgatgcagttgttcgcactctgtccattttagagtttgatttctgttttcacctcgaatacaacgcagacatcaacgaacaccgattaccaagacggatccatggagaaaaaaatcactggatataccaccgttgatatatcccaatggcatcgtaaagaacattttgaggcatttcagtcagttgctcaatgtacctataaccagaccgttcagctggatattacggcctttttaaagaccgtaaagaaaaataagcacaagttttatccggcctttattcacattcttgcccgcctgatgaatgctcatccggagttccgtatggcaatgaaagacggtgagctggtgatatgggatagtgttcacccttgttacaccgttttccatgagcaaactgaaacgttttcatcgctctggagtgaataccacgacgatttccggcagtttctacacatatattcgcaagatgtggcgtgttacggtgaaaacctggcctatttccctaaagggtttattgagaatatgtttttcgtctcagccaatccctgggtgagtttcaccagttttgatttaaacgtggccaatatggacaacttcttcgcccccgttttcactatgggcaaatattatacgcaaggcgacaaggtgctgatgccgctggcgattcaggttcatcatgccgtttgtgatggcttccatgtcggcagaatgcttaatgaattacaacagtactgcgatgagtggcagggcggggcgtaatttttttaaggcagttattggtgccctggtacctcaacgcttccaacctttgagcgtatgccatagagcgccaactctaacgcttttgtgtccaaaagtgtgtttcatacatactccccatccaatgtgatcaccatccatttcagagggctcacaggaggtggtaattttacaacgttggatttgggtagttgctaaaatttgcagagttttggcgcaatattatgcgaacttatgctgcaaatagtattttaacacgttgatagttggttcgcgttatgaagacttatcttgcaagcatcaccatctgctctacagaaaatccttcgacgtcaggtggcacttttcggggaaatgtgcgcggaacccctatttgtttatttttctaaatacattcaaatatgtatccgctcatgagacaataaccctgataaatgcttcaataatattgaaaaaggaagagtatgagtattcaacatttccgtgtcgcccttattcccttttttgcggcattttgccttcctgtttttgctcacccagaaacgctggtgaaagtaaaagatgctgaagatcagttgggtgcacgagtgggttacatcgaactggatctcaacagcggtaagatccttgagagttttcgccccgaagaacgttttccaatgatgagcacttttaaagttctgctatgtggcgcggtattatcccgtattgacgccgggcaagagcaactcggtcgccgcatacactattctcagaatgacttggttgagtactcaccagtcacagaaaagcatcttacggatggcatgacagtaagagaattatgcagtgctgccataaccatgagtgataacactgcggccaacttacttctgacaacgatcggaggaccgaaggagctaaccgcttttttgcacaacatgggggatcatgtaactcgccttgatcgttgggaaccggagctgaatgaagccataccaaacgacgagcgtgacaccacgatgcctgtagcaatggcaacaacgttgcgcaaactattaactggcgaactacttactctagcttcccggcaacaattaatagactggatggaggcggataaagttgcaggaccacttctgcgctcggcccttccggctggctggtttattgctgataaatctggagccggtgagcgtgggtctcgcggtatcattgcagcactggggccagatggtaagccctcccgtatcgtagttatctacacgacggggagtcaggcaactatggatgaacgaaatagacagatcgctgagataggtgcctcactgattaagcattggtaa

SEQ ID NO: 1899 - DNA, 3229 bp, Synthetic construct
  source 1..3229: mol_type = other DNA
ctgtcagaccaagtttactcatatatactttagattgatttaaaacttcatttttaatttaaaaggatctaggtgaagatcctttttgataatctcatgaccaaaatcccttaacgtgagttttcgttccactgagcgtcagaccccgtagaaaagatcaaaggatcttcttgagatcctttttttctgcgcgtaatctgctgcttgcaaacaaaaaaaccaccgctaccagcggtggtttgtttgccggatcaagagctaccaactctttttccgaaggtaactggcttcagcagagcgcagataccaaatactgttcttctagtgtagccgtagttaggccaccacttcaagaactctgtagcaccgcctacatacctcgctctgctaatcctgttaccagtggctgctgccagtggcgataagtcgtgtcttaccgggttggactcaagacgatagttaccggataaggcgcagcggtcgggctgaacggggggttcgtgcacacagcccagcttggagcgaacgacctacaccgaactgagatacctacagcgtgagctatgagaaagcgccacgcttcccgaagggagaaaggcggacaggtatccggtaagcggcagggtcggaacaggagagcgcacgagggagcttccagggggaaacgcctggtatctttatagtcctgtcgggtttcgccacctctgacttgagcgtcgatttttgtgatgctcgtcaggggggcggagcctatggaaaaacgccagcaacgcggcctttttacggttcctggccttttgctggccttttgctcacatgttctttcctgcgttatcccctgattctgtggataaccgtattaccgcctttgagtgagctgataccgctcgccgcagccgaacgaccgagcgcagcgagtcagtgagcgaggaagcggaagagctaacgtttaaaacactcgttcaaaatgtaaaaaaaaccatacgttgattttacgaaaccatacgctgaaataaaaacaaccataccttgaaattgcttataaagtgtacaacacttgagaaagtttactacaggtatggttgtttattatgaaaaaacggattcttagaaactcgtcagtaaaaaacatctcacgctttgtcagtctcaaaacgaactctatccatacagtcgaatccgacttggagtttgacgcatgtttccacttcgaattttaacgcttcaactcgacatctggatccatggagaaaaaaatcactggatataccaccgttgatatatcccaatggcatcgtaaagaacattttgaggcatttcagtcagttgctcaatgtacctataaccagaccgttcagctggatattacggcctttttaaagaccgtaaagaaaaataagcacaagttttatccggcctttattcacattcttgcccgcctgatgaatgctcatccggagttccgtatggcaatgaaagacggtgagctggtgatatgggatagtgttcacccttgttacaccgttttccatgagcaaactgaaacgttttcatcgctctggagtgaataccacgacgatttccggcagtttctacacatatattcgcaagatgtggcgtgttacggtgaaaacctggcctatttccctaaagggtttattgagaatatgtttttcgtctcagccaatccctgggtgagtttcaccagttttgatttaaacgtggccaatatggacaacttcttcgcccccgttttcactatgggcaaatattatacgcaaggcgacaaggtgctgatgccgctggcgattcaggttcatcatgccgtttgtgatggcttccatgtcggcagaatgcttaatgaattacaacagtactgcgatgagtggcagggcggggcgtaatttttttaaggcagttattggtgccctggtaccctgagcatacggtcaaggattgatgaattctatagttttttagctttcgagttcgcccccaatgccggtgaaaacatgctatgcagtacaaatcaggcataagtgtaagttctgtaagaaagtttcttactaaactatgaaggttggaatatccttttcaccaaaatatcaacttatggttgttttatgcgatatcaagatatggttgtttttcgattaagcctatgattttaattgattcgttgttatcactttatggttgtttcaacacaaaattttaagaattgagccacttgacgtcaggtggcacttttcggggaaatgtgcgcggaacccctatttgtttatttttctaaatacattcaaatatgtatccgctcatgagacaataaccctgataaatgcttcaataatattgaaaaaggaagagtatgagtattcaacatttccgtgtcgcccttattcccttttttgcggcattttgccttcctgtttttgctcacccagaaacgctggtgaaagtaaaagatgctgaagatcagttgggtgcacgagtgggttacatcgaactggatctcaacagcggtaagatccttgagagttttcgccccgaagaacgttttccaatgatgagcacttttaaagttctgctatgtggcgcggtattatcccgtattgacgccgggcaagagcaactcggtcgccgcatacactattctcagaatgacttggttgagtactcaccagtcacagaaaagcatcttacggatggcatgacagtaagagaattatgcagtgctgccataaccatgagtgataacactgcggccaacttacttctgacaacgatcggaggaccgaaggagctaaccgcttttttgcacaacatgggggatcatgtaactcgccttgatcgttgggaaccggagctgaatgaagccataccaaacgacgagcgtgacaccacgatgcctgtagcaatggcaacaacgttgcgcaaactattaactggcgaactacttactctagcttcccggcaacaattaatagactggatggaggcggataaagttgcaggaccacttctgcgctcggcccttccggctggctggtttattgctgataaatctggagccggtgagcgtgggtctcgcggtatcattgcagcactggggccagatggtaagccctcccgtatcgtagttatctacacgacggggagtcaggcaactatggatgaacgaaatagacagatcgctgagataggtgcctcactgattaagcattggtaa

SEQ ID NO: 1900 - DNA, 3229 bp, Synthetic construct
  source 1..3229: mol_type = other DNA
ctgtcagaccaagtttactcatatatactttagattgatttaaaacttcatttttaatttaaaaggatctaggtgaagatcctttttgataatctcatgaccaaaatcccttaacgtgagttttcgttccactgagcgtcagaccccgtagaaaagatcaaaggatcttcttgagatcctttttttctgcgcgtaatctgctgcttgcaaacaaaaaaaccaccgctaccagcggtggtttgtttgccggatcaagagctaccaactctttttccgaaggtaactggcttcagcagagcgcagataccaaatactgttcttctagtgtagccgtagttaggccaccacttcaagaactctgtagcaccgcctacatacctcgctctgctaatcctgttaccagtggctgctgccagtggcgataagtcgtgtcttaccgggttggactcaagacgatagttaccggataaggcgcagcggtcgggctgaacggggggttcgtgcacacagcccagcttggagcgaacgacctacaccgaactgagatacctacagcgtgagctatgagaaagcgccacgcttcccgaagggagaaaggcggacaggtatccggtaagcggcagggtcggaacaggagagcgcacgagggagcttccagggggaaacgcctggtatctttatagtcctgtcgggtttcgccacctctgacttgagcgtcgatttttgtgatgctcgtcaggggggcggagcctatggaaaaacgccagcaacgcggcctttttacggttcctggccttttgctggccttttgctcacatgttctttcctgcgttatcccctgattctgtggataaccgtattaccgcctttgagtgagctgataccgctcgccgcagccgaacgaccgagcgcagcgagtcagtgagcgaggaagcggaagagcgatgtggctgggttcccaccccttatgaagcctgcaatatatgttcgcataaattgcaggcttcttttcttatttgcaccctaagtcttcatggtctattttttgttgtaggtttacaacaaaagtgcttttgctatgtacgaccaaaccaaaaaatcatcagctgttcacaacatttgtaaattcatgagtttgaaaaatgactcagttgttcgaacaatgtccatgcttgagtatgatttttgttttcatgctgaatacaatcctcaaatagtcgaaatgccccagtgtagtgggatccatggagaaaaaaatcactggatataccaccgttgatatatcccaatggcatcgtaaagaacattttgaggcatttcagtcagttgctcaatgtacctataaccagaccgttcagctggatattacggcctttttaaagaccgtaaagaaaaataagcacaagttttatccggcctttattcacattcttgcccgcctgatgaatgctcatccggagttccgtatggcaatgaaagacggtgagctggtgatatgggatagtgttcacccttgttacaccgttttccatgagcaaactgaaacgttttcatcgctctggagtgaataccacgacgatttccggcagtttctacacatatattcgcaagatgtggcgtgttacggtgaaaacctggcctatttccctaaagggtttattgagaatatgtttttcgtctcagccaatccctgggtgagtttcaccagttttgatttaaacgtggccaatatggacaacttcttcgcccccgttttcactatgggcaaatattatacgcaaggcgacaaggtgctgatgccgctggcgattcaggttcatcatgccgtttgtgatggcttccatgtcggcagaatgcttaatgaattacaacagtactgcgatgagtggcagggcggggcgtaatttttttaaggcagttattggtgccctggtacctatgccggacaactatttccgacttgctaaattagcaaagacactaactcaaaattgtccaaaaccttcagagactgaattcttacccatacatgtacactatgtctttcgaagggttgatcggagtgtggtaattttactacgttgaattttagtagttctgtaaatatgcagactttcgatgcaatgttatgcgaacttatgttgcaaatagtactttaactctttgatacttggttcgaattatgcggacttatgttgcaagcatcaccttaaaaaagccgctctttatgaggacgtcaggtggcacttttcggggaaatgtgcgcggaacccctatttgtttatttttctaaatacattcaaatatgtatccgctcatgagacaataaccctgataaatgcttcaataatattgaaaaaggaagagtatgagtattcaacatttccgtgtcgcccttattcccttttttgcggcattttgccttcctgtttttgctcacccagaaacgctggtgaaagtaaaagatgctgaagatcagttgggtgcacgagtgggttacatcgaactggatctcaacagcggtaagatccttgagagttttcgccccgaagaacgttttccaatgatgagcacttttaaagttctgctatgtggcgcggtattatcccgtattgacgccgggcaagagcaactcggtcgccgcatacactattctcagaatgacttggttgagtactcaccagtcacagaaaagcatcttacggatggcatgacagtaagagaattatgcagtgctgccataaccatgagtgataacactgcggccaacttacttctgacaacgatcggaggaccgaaggagctaaccgcttttttgcacaacatgggggatcatgtaactcgccttgatcgttgggaaccggagctgaatgaagccataccaaacgacgagcgtgacaccacgatgcctgtagcaatggcaacaacgttgcgcaaactattaactggcgaactacttactctagcttcccggcaacaattaatagactggatggaggcggataaagttgcaggaccacttctgcgctcggcccttccggctggctggtttattgctgataaatctggagccggtgagcgtgggtctcgcggtatcattgcagcactggggccagatggtaagccctcccgtatcgtagttatctacacgacggggagtcaggcaactatggatgaacgaaatagacagatcgctgagataggtgcctcactgattaagcattggtaa

SEQ ID NO: 1901 - DNA, 3229 bp, Synthetic construct
  source 1..3229: mol_type = other DNA
ctgtcagaccaagtttactcatatatactttagattgatttaaaacttcatttttaatttaaaaggatctaggtgaagatcctttttgataatctcatgaccaaaatcccttaacgtgagttttcgttccactgagcgtcagaccccgtagaaaagatcaaaggatcttcttgagatcctttttttctgcgcgtaatctgctgcttgcaaacaaaaaaaccaccgctaccagcggtggtttgtttgccggatcaagagctaccaactctttttccgaaggtaactggcttcagcagagcgcagataccaaatactgttcttctagtgtagccgtagttaggccaccacttcaagaactctgtagcaccgcctacatacctcgctctgctaatcctgttaccagtggctgctgccagtggcgataagtcgtgtcttaccgggttggactcaagacgatagttaccggataaggcgcagcggtcgggctgaacggggggttcgtgcacacagcccagcttggagcgaacgacctacaccgaactgagatacctacagcgtgagctatgagaaagcgccacgcttcccgaagggagaaaggcggacaggtatccggtaagcggcagggtcggaacaggagagcgcacgagggagcttccagggggaaacgcctggtatctttatagtcctgtcgggtttcgccacctctgacttgagcgtcgatttttgtgatgctcgtcaggggggcggagcctatggaaaaacgccagcaacgcggcctttttacggttcctggccttttgctggccttttgctcacatgttctttcctgcgttatcccctgattctgtggataaccgtattaccgcctttgagtgagctgataccgctcgccgcagccgaacgaccgagcgcagcgagtcagtgagcgaggaagcggaagagcgatgtggctggggcttccacccaactgatgcttgcaaaattactctgcataaattgcaaagaagtctacaaatttgcaaaataagcctgcataaactacctttagttgtaagtttacaacatagaggtgaatatcatgtacgttcgtacactaaaacaatctcaagtaaaaaacattagcaaatttatgagcctgaagaatgattcgatcattcgtacagaatctatgcttgaatttgatatgtgctttcatcttgaatattctcctgatgttgtacgcccctatccattttagcggatccatggagaaaaaaatcactggatataccaccgttgatatatcccaatggcatcgtaaagaacattttgaggcatttcagtcagttgctcaatgtacctataaccagaccgttcagctggatattacggcctttttaaagaccgtaaagaaaaataagcacaagttttatccggcctttattcacattcttgcccgcctgatgaatgctcatccggagttccgtatggcaatgaaagacggtgagctggtgatatgggatagtgttcacccttgttacaccgttttccatgagcaaactgaaacgttttcatcgctctggagtgaataccacgacgatttccggcagtttctacacatatattcgcaagatgtggcgtgttacggtgaaaacctggcctatttccctaaagggtttattgagaatatgtttttcgtctcagccaatccctgggtgagtttcaccagttttgatttaaacgtggccaatatggacaacttcttcgcccccgttttcactatgggcaaatattatacgcaaggcgacaaggtgctgatgccgctggcgattcaggttcatcatgccgtttgtgatggcttccatgtcggcagaatgcttaatgaattacaacagtactgcgatgagtggcagggcggggcgtaatttttttaaggcagttattggtgccctggtaccgagacgggtttaaggaggaagattttatgatacaaaagttatctgtatttatctaatttaagtggctactctaagaaggttctgtccaaaaaaaagttacatttattaataacacatgaaattaaattacatactaaaattacagtcatattttaaggtaaaacattttgcagactatcactgcaaaaccatgtgatcttatgttgcaaattcaaaactaagcttttgatttttatatgagagctatgcaagcttatgttgcaagcatcaccaactgatgcttgcaaaatcactcgacgtcaggtggcacttttcggggaaatgtgcgcggaacccctatttgtttatttttctaaatacattcaaatatgtatccgctcatgagacaataaccctgataaatgcttcaataatattgaaaaaggaagagtatgagtattcaacatttccgtgtcgcccttattcccttttttgcggcattttgccttcctgtttttgctcacccagaaacgctggtgaaagtaaaagatgctgaagatcagttgggtgcacgagtgggttacatcgaactggatctcaacagcggtaagatccttgagagttttcgccccgaagaacgttttccaatgatgagcacttttaaagttctgctatgtggcgcggtattatcccgtattgacgccgggcaagagcaactcggtcgccgcatacactattctcagaatgacttggttgagtactcaccagtcacagaaaagcatcttacggatggcatgacagtaagagaattatgcagtgctgccataaccatgagtgataacactgcggccaacttacttctgacaacgatcggaggaccgaaggagctaaccgcttttttgcacaacatgggggatcatgtaactcgccttgatcgttgggaaccggagctgaatgaagccataccaaacgacgagcgtgacaccacgatgcctgtagcaatggcaacaacgttgcgcaaactattaactggcgaactacttactctagcttcccggcaacaattaatagactggatggaggcggataaagttgcaggaccacttctgcgctcggcccttccggctggctggtttattgctgataaatctggagccggtgagcgtgggtctcgcggtatcattgcagcactggggccagatggtaagccctcccgtatcgtagttatctacacgacggggagtcaggcaactatggatgaacgaaatagacagatcgctgagataggtgcctcactgattaagcattggtaa

SEQ ID NO: 1902 - DNA, 3229 bp, Synthetic construct
  source 1..3229: mol_type = other DNA
ctgtcagaccaagtttactcatatatactttagattgatttaaaacttcatttttaatttaaaaggatctaggtgaagatcctttttgataatctcatgaccaaaatcccttaacgtgagttttcgttccactgagcgtcagaccccgtagaaaagatcaaaggatcttcttgagatcctttttttctgcgcgtaatctgctgcttgcaaacaaaaaaaccaccgctaccagcggtggtttgtttgccggatcaagagctaccaactctttttccgaaggtaactggcttcagcagagcgcagataccaaatactgttcttctagtgtagccgtagttaggccaccacttcaagaactctgtagcaccgcctacatacctcgctctgctaatcctgttaccagtggctgctgccagtggcgataagtcgtgtcttaccgggttggactcaagacgatagttaccggataaggcgcagcggtcgggctgaacggggggttcgtgcacacagcccagcttggagcgaacgacctacaccgaactgagatacctacagcgtgagctatgagaaagcgccacgcttcccgaagggagaaaggcggacaggtatccggtaagcggcagggtcggaacaggagagcgcacgagggagcttccagggggaaacgcctggtatctttatagtcctgtcgggtttcgccacctctgacttgagcgtcgatttttgtgatgctcgtcaggggggcggagcctatggaaaaacgccagcaacgcggcctttttacggttcctggccttttgctggccttttgctcacatgttctttcctgcgttatcccctgattctgtggataaccgtattaccgcctttgagtgagctgataccgctcgccgcagccgaacgaccgagcgcagcgagtcagtgagcgaggaagcggaagagcgaacctccaaaacttcctctttttttgtcgctttcaacataagttgtcattattttcaggaaaagctgtcgagttttcaggaaaaactgtcataacgttaattctaaattaacttcagattaagatttacgaaaagctctcaaaaaaattgagtttatccgataagcgttcagtatgtgatcttcagttagttgaaggtgagcgctatgcctatatcgcgtcgaaatattagtcactcaagagttaaaaatctttctaagctctctaacttcaaaccgctaccgaaggaactcttggatccatggagaaaaaaatcactggatataccaccgttgatatatcccaatggcatcgtaaagaacattttgaggcatttcagtcagttgctcaatgtacctataaccagaccgttcagctggatattacggcctttttaaagaccgtaaagaaaaataagcacaagttttatccggcctttattcacattcttgcccgcctgatgaatgctcatccggagttccgtatggcaatgaaagacggtgagctggtgatatgggatagtgttcacccttgttacaccgttttccatgagcaaactgaaacgttttcatcgctctggagtgaataccacgacgatttccggcagtttctacacatatattcgcaagatgtggcgtgttacggtgaaaacctggcctatttccctaaagggtttattgagaatatgtttttcgtctcagccaatccctgggtgagtttcaccagttttgatttaaacgtggccaatatggacaacttcttcgcccccgttttcactatgggcaaatattatacgcaaggcgacaaggtgctgatgccgctggcgattcaggttcatcatgccgtttgtgatggcttccatgtcggcagaatgcttaatgaattacaacagtactgcgatgagtggcagggcggggcgtaatttttttaaggcagttattggtgccctggtacctaaggtcgtgaccggaatcaagtaaccaccactcttatacattatcctctataatttcacttttttcttctaatcgaaggggctaatcaaatcgagttttctggtactattttagcattggaaactgagcagttttatgacagttattactgcaataaatttgctttatgacagctattactgaaaattatgacagcattaactgacaaaccgttctttacagtccgcattcacttgttcgtcttatgacaataattcctgaaagcaacattttttgtcgctttcaattttgaatgacgtcaggtggcacttttcggggaaatgtgcgcggaacccctatttgtttatttttctaaatacattcaaatatgtatccgctcatgagacaataaccctgataaatgcttcaataatattgaaaaaggaagagtatgagtattcaacatttccgtgtcgcccttattcccttttttgcggcattttgccttcctgtttttgctcacccagaaacgctggtgaaagtaaaagatgctgaagatcagttgggtgcacgagtgggttacatcgaactggatctcaacagcggtaagatccttgagagttttcgccccgaagaacgttttccaatgatgagcacttttaaagttctgctatgtggcgcggtattatcccgtattgacgccgggcaagagcaactcggtcgccgcatacactattctcagaatgacttggttgagtactcaccagtcacagaaaagcatcttacggatggcatgacagtaagagaattatgcagtgctgccataaccatgagtgataacactgcggccaacttacttctgacaacgatcggaggaccgaaggagctaaccgcttttttgcacaacatgggggatcatgtaactcgccttgatcgttgggaaccggagctgaatgaagccataccaaacgacgagcgtgacaccacgatgcctgtagcaatggcaacaacgttgcgcaaactattaactggcgaactacttactctagcttcccggcaacaattaatagactggatggaggcggataaagttgcaggaccacttctgcgctcggcccttccggctggctggtttattgctgataaatctggagccggtgagcgtgggtctcgcggtatcattgcagcactggggccagatggtaagccctcccgtatcgtagttatctacacgacggggagtcaggcaactatggatgaacgaaatagacagatcgctgagataggtgcctcactgattaagcattggtaa

SEQ ID NO: 1903 - DNA, 12039 bp, Synthetic construct
  source 1..12039: mol_type = other DNA
aacgtggctggcctggttcaccacgcgggaaacggtctgataagagacaccggcatactctgcgacatcgtataacgttactggtttcacattcaccaccctgaattgactctcttccgggcgctatcatgccataccgcgaaaggttttgcgccattcgatggtgtccgggatctcgacgctctcccttatgcgactcctgcattaggaaattaatacgactcactataggggaattgtgagcggataacaattcccctgtagaaataattttgtttaactttaataaggagatataccatgggtgttccgccgaataggcggctaagaaaagtacagcgcggctgaaatcatcattaaagcggtgttccgccgaataggcggctaagaaatagcgaattccgagcgaaggagatattcatatggatacggacatcgaagtttactctgatgaatctctcgaaagttttttactacgcttgagtaagtttcaaggctacgagcggtttgctcatttcgctgaggacatttggcaaactacgttattgcaacatgaggctattcccggcgcatttcctttcgagttaagtcgaatcaacatctataaagctcaaacaacgagccaaatgcgagttcgagtacttatagatttggaaaagcggctgaaatttaacgactttggcgttctacggctatcgcttgctcattctaaagcaagtttctctccagattataaagcggtaaatcgctatggtgctgattatcctcaagcctttcttagaaaaaacttcacacctgtttgccctaaatgcctagacgaagctgcttatattcgtcagttgtggcatttcattccctaccaagtttgccataaacaccacagccaactcgctcaacgatgccccgaatgcggaaaattattgaactaccaatcgtcagagctaatagagaattgtgaatgtggtttttccttacttaatggcgaatcagagaaggaaagctgttctactttatttgttgcacagtggctggcaggggagaaacccgtagaatcaggattaatgagtcaggaactcactcaatcaagtcggtttggatttctgctttggtatatcaaccgatatggtgaacttgatgatattagttttgatggctttgttgagtgttgtaaatcttggccgaacaagctcaataccgatttagattctattgtgcagaaggctgacatagtgcgaatccagccttggaacaaaatctacttcagtgaagtgtttggtgacttgttgaaagagtgtcgcagcctaccaagccgtgatcttagtaaaaatccggtgctgaaaaatgtagttctatatttcagagctttaatcaccaataatcctaaagtgaaatcagcaaacataggtgatgtattattaagccctttagaggcttctacattgctttcatgtaccacagacgaaatatatcgcctgtaccagtttggacagcttaaagctcaacacacgcccaagttgcagagtaaaatagaaaaccatcactctgttttcactcttcgtagcattatcgaactcaagttatccagtatgtgtagtgaaactgatggtttaaatcattatttgccagagtggtaagctatgacaactttgcaagatttaatcgatattgaggactctaagctccgatttatagagataaaaaaagcgtttatgccgtatacacgaccagtagaagttgatgggagtgaaaaacaggcattaattgttttactcaatctttcattgagtaaaccggaagtgaaagactggctcgattttcctcgcgctttggactatttcgccgattcagataacttatcggcggctgaacaagaaattcagtggtttcatacccataaccttaagttcccagattgccgagtatcagagcagcgaatcatagctacacctctgtacactgagactcctacactcacgagtcagtcattaaacagagcttatggctgggcgcacaattccgctgtttataaacatactatctggttattaaatgagttccggtggcgtggaagagtggaaaatctgcttaatcttatttgtggtggtgatgatttttggctggaacttttagctgatatgggattaaaacctaaagcacaaatacagcttaaagatctaattgaacatcagttaccgttgactcattttcccgacgaagtgaaccgctacagcaagcagctccgtttcccttggaggggggattacctatcagtaacccctgtggttagccatgctatacagcagcaactctctgttttgtctcgtcaaggtgaatgttctcttcgctttaaaacaatgacctatccaaattcagctagtattggaaatttatgtggttcactgggaggatatataaatgtactcaattatccgattgacgtaattgcgaatcgacatcaaacactcggtgcaagccgcagtagaaccaagcgctactttgatgattttcagttaacgtcaaaaagtacctgtagtgtattggctcatctgacaggttttgaacaacctcaaatgcgcaaagcgcagaaacacgttcgccagtatcaactgaaaattatacgtaaacaaatcgctttatggttactcccgcttattgaattacgggataattcagtcactgatccgattggcttttatgatgaaccagatgatgaactggcgaagcgattcttgaccatcaatgagcttgattttatagaactcacaaccagcttaaatcagcgcttgaatatagctttacagaacaaccgctttgcttctcgttttgcctaccatcccaaactgatgcgtgtgttaaaaacagagcttatttgggtgctaactcagctaagtcaacctgaaccagaacctcctactgtttctgatagtaaagtgcagtatctttacctttcatctatgagagtatttgatgctgctgcaatgagttgcccgtacttatctggtgcgccttcattaacggcggtgtggggatttgttcatcgttaccagagagagctacaagatttgctatctgatggagaagggcaattcgagtttaaagattttgctttttttattcgtgatgaatccgtacaaaccagcgcaaagctcaccgaacccagtgtaatagcaaaagctcggagtatttcacaagttaagcgaaccacgatcattcgtgaagattgctcggatttaatattcgatattgtaattgcaatagaaagtgaccaacgaatttcagattaccaaagccagtttaaagctgcattaccaactaatttcgctggaggggccttgtttcaacccgagattaattcagggattaattggttaagaacctttgtaagtaagtcagaattgttccaagcggtgaaaggtttaccgggctatggtacttggttgtcaccagattcttttcaacctcaaaatctggctgagttacaagagtgtttaacgattgatagttcgctaattcctgtatcaaatggctttcattttctagggtcgccacaggaacggaagggggcattgacgaagcttcattgttatgcggaaaacaacattgctttagctaaacgaaccaatccaatagaagtaagatttgccggtagtgatcacttttttgagcaggtgttttggtcgctggaagtgacagagcagactatccttataaaaaacaaaaggatttagccgcctatggaactctgtagtcagttaaattatgttcgctcgttatcacctggcagagcatatttttattatcttgatgaagataataagatgcgtccacttcagatagacaggactcatttacgagcacccaaaagtggctattcagaggctttctcgggtaatttcaaatctaaaaatatagctccgcaagatctttcctattcaaacccacaattcattgaagagtgttacgtgccgcccggagtaaatgacatctattgtgctttctcgttaagagttcgagcgaactcattatcaccagaagtatgtgttgataatgaggttcgagacatactctgtaattttgcggcactgtataaagaattaggaggttatcgggagctggcaaggcgttatgccaaaaatattttgatgggtacgtgggtttggcgtaaccgagagtgcagaaatataagggttgaagttaaaacagaagataaagagtgggtaattactgacgcaaggtttttagattggtatggctcgtgggagaaggattcacaattagccttagatgaatttactgactatttgtctcaagcattgtctgatagaacctgctatttcaatatggatattaaagcgaagctcactgtaggttggggcgatgaggtttacccaagccaagagttcttagatgtgaaagaagcaggaaagccaagcaaactgttggcaaaagtaaccgtcaatggcgaagagtcagcagcctttcattcgcagaaagtgggagcggcgattcaacgaatcgatgactggtgggatgaaaatgccgataagccgcttcgcgttaatgaatatggagcagacaaagaatatgcaatagcaaggcgacatagttcacgacaccgggacttctactcattgattgcacacactgaaagctatgttgaattgatgctagaaacgaatctgatctcagatgatgtccactttatcatggcagtactaactaaaggtggagtgttcagcggtgcaagcaagaaaagcaagaaggatgagtaatggaatctcgctattatttttctattcgatatattcctgaacacgttgacaatgaactattggcaggtcggtgtatttctaatatgcatgggtttctttctcacgaacgcaacacgcaattcaaaaatagtgtgggtatttgtttccccctttggaatgaacaaacggtcggtaatgtgattacttttgtctcgactaatgaaagtatcctcactggcctatcataccaaccttacttctctacaatgatgaacgagaacctctttgaaatctcaggtattaggattgttcctgatgacgctaaggacgttcgatttgtattcaataaaacaattcaaaagatattcaatggttctaaaaagcgaagaattaaacgagcgatgaaacgtgctgaagaatttggtcatactttcacacctatatcagttgaagtacgggagtttgagttgttccacgagattcctataaacagcaaatcatcaggacgtgatttcgttctacatatacaacgccaaaatccagtggaagcggaaataggacagggatttaatggctatggttttgcatcaaatcagctatggcgaagaacagtcccacttatcttgttttgacctttaataaggagatatagcatgtacgttcgcaatcttcgtaaaccttcagcaaacaaaaacgtttataagtttgttagtgtaaaaaatggctgcaatatcatgtgcgaaagctcattggaatatgattgttgctactatctcgagtattcggatgatgttgttcgttaccagtcacagccgaaaggataccgttttccttatcaaggtaaagaacatccatacacccctgattttttagtccataagaaagatggaacgtcttatctcctcgaagtaaaaccactatcaaaaacattcagctccgagttccaagatgtatttcgccaaaaacaaatcatggcaagtgaattgggggcacctctattactcgtgacagaccgccaaattcggaacgatgtgcaccttaataatttaaaactcgtacatcgttatagcggttgtatcggaaattctagccatttggaaagtgtttggtcagccgttaatcaatcctcatcgatttgtattaaggcgttatctgcaattttgaatctaaccattggtgaagtttttgcttccgtactacgtcttattggtttaggaaaagccaaaacaaaattggatgttttactggatgaaaattctttaatttcggtggcttaatatgtcttttgggccatttgaagatgagttcggttcaataacaaatgacgttcagcaacaatatgaggcaagccctgaagctaaactatctcggctgaagtattcacctcttgaaaccaccaaggttattgagcgagatctatcttcttttcctgaagaacaaaaactaaaagcgctggaacgttataaattaatctctttgattgctaaggagataaatggtggctggacacctaaaaatcttatcccattgatagataagcatatagaaacacttaatataccgaagcccagtgatcgtacagtaaaacgttggtataaggctttttgtgaaagcgatggtgatattaagagtttggttgatagtcatcacttaaagggaaaccggcagcccagaattgaggacgatgaaccgttttttatagaggctgttgaacgttttttagatgctgttcgtccttcttactctaaggcttatcaggtttactgtgaccgaattgaaattgaaaatagcactatcgtttcaggtaagatagcgaaagtcagctatgaggctttcaagaaacggctcaaaaaactccctccatataccgtcgctctcaagcgtcatggtaaatattacgccgacaaactgtttaactactatgaagcagtcaagatgcctacgcgtatcctggaaagagtagagattgaccatactcctctggatttaatcttgctcgatgatgagctgcttgtgccgttggggagagcctatttaactttattagttgatgtgtttagtggctgtataattggatttcatctcggtttcaaagcaccaagttatactgcggtttcaaaggcaattatccattcagttaaatcaaaggaatacgttaatgaattgccaatcggattgtcgaaccaatggatttgtcatggaaaaatagaaaatcttgttgttgataacggtgctgagttttggtcgaaaagtttagaccaagcatgtattgaggctggtatcaacataatctataacaaagttcgtaagccttggttaaagccctttgttgagagaaaatttggtgaactaattcaaggtattgtgggatgggttcctggcagaacattttccaatgttcttgagaaagaagattatgaccctcaaaaagatgctgtgatgcgttttagtgttttcgttgaagagttacatcgctggattattgatgtgcataacgcttcagcggatagccgacatacgcggatacctaattatcattggcaaaagagtgaagaagtattgccacctcctgctttgactgagcgtgacgagatacaattccgtgtaattatggggatggttcataaaggggcattaaccagtaaagggataaaatttaagcacttaatgtacgacaatgtggcgttagaacactatcgtaaacagtatccgcaatccaaagatagcaggataaaaacggtcaagattgaccctgatgacttatctcgtatctttgtgtttcttgaagaaaaaaagggttatatagaagtcccttgtaagtatgacccacttggttacaccaaaaaacttagcctttgtgagcatttaagaacggtaaaagtacaccgtgattttataaaaggacaagttgattcattatcactagctaaagcacgtcaggctttgcatgagagaattaagcaggaacatgaaaacttacgtcagatgtcgttacctcatcgtgctaaaaaggctaaaaacggtaagaaaatggctgaactggctggtgttaacagcgatagccctaaatccataacaaccgattatccgatagaggacaccatacaacttcacgaatctacacctgtcgatgatctccaatcactttggaataagcgcagggcattaaggaagtccggaaaatgacatcgcttcagccaacgaataatgacgtcgatgtattactagctgagttccatcagtcattcgtcgtttatccagatgttgaaaaggtttttgaaggtttagattggattgttcgtcgcagccagttcggtaagtttgcgccttctatgctaattacaggcgggacaggtgcgggaaagacttcagtggttgaaatctatttgaacaaccatttttcctcttcagaagtgttaatcacaagagtcaggccaagttttgttgaaacattaatttgggcgatcgaaaagctgaatgttccttacaacagtcggtcgaaacggtctgagattggcctacaagattatttcatcaatagtgttaagaaatctaagctgaagctgttggttatagaagaagctcaagaattgtttgagtgcgcatctcctaaagaaaggcaaaaaatacgtgaccgattaaagatgatcagtgatgaatgtcgattacctatcgtctttattggtattcctaccgccaaacttatcttggaagattcacaatgggacagacgaattatggtgaagcgagacttgccatatatccgaataacgaacgaagagtctttagatgtctatattgccttacttgaggggcttgaaaagaccttacctatttcagtcgctccagaactgactgatatggacatggctatgcgtttattagctgccagtagagggatgctcggtttaatcaaagaacttgtaggttatgcgtttgaactggctttactcgaaggtaaacgtcagattactcaaaacgaatttgttcaggcatttaaatctatttttggtcccgatattagtaacccatttgagattgaactggataaattactaatcccgcagattattgagtatgaaggctatcttttggactcagatagtggggacatcaagtttactcatcagatatttgaggacataccattaacagaattactacgctaacctaggctgctgccaccgctgagcaataactagcataaccccttggggcctctaaacgggtcttgaggggttttttgctgaaacctcaggcatttgagaagcacacggtcacactgcttccggtagtcaataaaccggtaaaccagcaatagacataagcggctatttaacgaccctgccctgaaccgacgaccgggtcatcgtggccggatcttgcggcccctcggcttgaacgaattgttagacattatttgccgactaccttggtgatctcgcctttcacgtagtggacaaattcttccaactgatctgcgcgcgaggccaagcgatcttcttcttgtccaagataagcctgtctagcttcaagtatgacgggctgatactgggccggcaggcgctccattgcccagtcggcagcgacatccttcggcgcgattttgccggttactgcgctgtaccaaatgcgggacaacgtaagcactacatttcgctcatcgccagcccagtcgggcggcgagttccatagcgttaaggtttcatttagcgcctcaaatagatcctgttcaggaaccggatcaaagagttcctccgccgctggacctaccaaggcaacgctatgttctcttgcttttgtcagcaagatagccagatcaatgtcgatcgtggctggctcgaagatacctgcaagaatgtcattgcgctgccattctccaaattgcagttcgcgcttagctggataacgccacggaatgatgtcgtcgtgcacaacaatggtgacttctacagcgcggagaatctcgctctctccaggggaagccgaagtttccaaaaggtcgttgatcaaagctcgccgcgttgtttcatcaagccttacggtcaccgtaaccagcaaatcaatatcactgtgtggcttcaggccgccatccactgcggagccgtacaaatgtacggccagcaacgtcggttcgagatggcgctcgatgacgccaactacctctgatagttgagtcgatacttcggcgatcaccgcttccctcatactcttcctttttcaatattattgaagcatttatcagggttattgtctcatgagcggatacatatttgaatgtatttagaaaaataaacaaatagctagctcactcggtcgctacgctccgggcgtgagactgcggcgggcgctgcggacacatacaaagttacccacagattccgtggataagcaggggactaacatgtgaggcaaaacagcagggccgcgccggtggcgtttttccataggctccgccctcctgccagagttcacataaacagacgcttttccggtgcatctgtgggagccgtgaggctcaaccatgaatctgacagtacgggcgaaacccgacaggacttaaagatccccaccgtttccggcgggtcgctccctcttgcgctctcctgttccgaccctgccgtttaccggatacctgttccgcctttctcccttacgggaagtgtggcgctttctcatagctcacacactggtatctcggctcggtgtaggtcgttcgctccaagctgggctgtaagcaagaactccccgttcagcccgactgctgcgccttatccggtaactgttcacttgagtccaacccggaaaagcacggtaaaacgccactggcagcagccattggtaactgggagttcgcagaggatttgtttagctaaacacgcggttgctcttgaagtgtgcgccaaagtccggctacactggaaggacagatttggttgctgtgctctgcgaaagccagttaccacggttaagcagttccccaactgacttaaccttcgatcaaaccacctccccaggtggttttttcgtttacagggcaaaagattacgcgcagaaaaaaaggatctcaagaagatcctttgatcttttctactgaaccgctctagatttcagtgcaatttatctcttcaaatgtagcacctgaagtcagccccatacgatataagttgtaattctcatgttagtcatgccccgcgcccaccggaaggagctgactgggttgaaggctctcaagggcatcggtcgagatcccggtgcctaatgagtgagctaacttacattaattgcgttgcgctcactgcccgctttccagtcgggaaacctgtcgtgccagctgcattaatgaatcggccaacgcgcggggagaggcggtttgcgtattgggcgccagggtggtttttcttttcaccagtgagacgggcaacagctgattgcccttcaccgcctggccctgagagagttgcagcaagcggtccacgctggtttgccccagcaggcgaaaatcctgtttgatggtggttaacggcgggatataacatgagctgtcttcggtatcgtcgtatcccactaccgagatgtccgcaccaacgcgcagcccggactcggtaatggcgcgcattgcgcccagcgccatctgatcgttggcaaccagcatcgcagtgggaacgatgccctcattcagcatttgcatggtttgttgaaaaccggacatggcactccagtcgccttcccgttccgctatcggctgaatttgattgcgagtgagatatttatgccagccagccagacgcagacgcgccgagacagaacttaatgggcccgctaacagcgcgatttgctggtgacccaatgcgaccagatgctccacgcccagtcgcgtaccgtcttcatgggagaaaataatactgttgatgggtgtctggtcagagacatcaagaaataacgccggaacattagtgcaggcagcttccacagcaatggcatcctggtcatccagcggatagttaatgatcagcccactgacgcgttgcgcgagaagattgtgcaccgccgctttacaggcttcgacgccgcttcgttctaccatcgacaccaccacgctggcacccagttgatcggcgcgagatttaatcgccgcgacaatttgcgacggcgcgtgcagggccagactggaggtggcaacgccaatcagcaacgactgtttgcccgccagttgttgtgccacgcggttgggaatgtaattcagctccgccatcgccgcttccactttttcccgcgttttcgcaga

SEQ ID NO: 1904 - DNA, 12092 bp, Synthetic construct
  source 1..12092: mol_type = other DNA
aacgtggctggcctggttcaccacgcgggaaacggtctgataagagacaccggcatactctgcgacatcgtataacgttactggtttcacattcaccaccctgaattgactctcttccgggcgctatcatgccataccgcgaaaggttttgcgccattcgatggtgtccgggatctcgacgctctcccttatgcgactcctgcattaggaaattaatacgactcactataggggaattgtgagcggataacaattcccctgtagaaataattttgtttaactttaataaggagatataccatgggtgacctgccgcataggcagctaagaatagtacagcgcggctgaaatcatcattaaagcggtgacctgccgcataggcagctaagaattagcgaattccgagcgaaggagatatacatatgaataccgaccttcaactataccctgacgagtcgctagagagcttcttgttacgcttatcgcaagaacaaggctacgagcgattttctcattttgctgaggacatctggtttgacacgatggatcagcatgaagcgatttctggtgctttccctttagaactcaatcgagtcaacatctaccacgctcaaacaacaagccaaatgcgagcgcgggttcttattcaccttgagaaccaattcaagctcaataactttggtgtactgcgtctcgcgctatcacactcgaaagctcaattctctccgcaatacaaagcggtacatagattcgggtctgactacccgtatgcttttcttcgcaaacgcttcacgccaatttgccctctgtgtattagcgaagctccctacattcgccagcagtggcaatatatctctcaccaagcctgtgaacatcatggctgtaaactggttcatcactgccctgagtgtatatcgagactagaatatcaaggaaccgagagcattagccagtgtgaatgtggttatgaactccgaaactcgccagtagaggacgcgtcagaggctgaggtattggtagctcgatggttatcaggaagcgattcaaaacccttgggattattgaaagcaggaatgactttatctgaacgctacggttttttaatttggtatgtaagtcgctatagtgacgtcgatgatattagctttgaagcctttattgactattgcttcgcatggccaacatcactcaaagaggacttagatgcattggtgctaaaagctgatgtagttcgagtgagagattggcgaaaggctttcttttcagaggcgtttggcagcttgcttaaagactgtcgtcatttgccgagccgcgagttgagtaaaaacttagtgttgaatgaagtgttgaggtatctctcagggcttgtttcggataacccagcctcatctaagggaaatgttggtgatgtgcttctaagcccgttagaagcctctacattgctttcttgcacaacagatgaagtatatcggctctatgagtttggtgaaatcaaagctgctattcggccgcgtatgcatactaaaatagccagccatgaatcggctttcacgctaagaagcgtggtagaaactaagctaactcgaatgagttcagaaatggatgggctttgcgtatatttgccggagtggtaagcatgacgaaacttattgagttgctctcaatcgaagatgcgaataaaaagcaggcaatgcttaagaaatggttcatgccttacaccgcagacattgaagtggacgggcttgaggagacggcattaacggtactagttaacctaagctctcatcataaaggcgataaatgcaatgactggttagacaaagtccgtgcgaagcagcatttgagcgattcagaaaacatagactcatcaataggggaattgaaatggtttcactcgcacaatttgaaatatccagactgccgcgtagcagagcagaggctgattgctaaacctttgcaaaccgatgaagtgtttatttcgggaagaagtcttgaaccgagtttaggctgggcgcacaactcagcatattaccgacacgtattgtggttattgaatccttttcgttggcaatccaaatcaaccaatgttctcacgctagtgcgagaaggacaccacatttggttagcgttattgcaagactttgggttagaggtcaaaactctcgtcgctttgcaaaaggcgattaacgcacaagttccagattcaacctttcctacatcagtcagttcgtatagcaagcagttacgatttccgtgggagaacgactatgtatccattaccccggttgtgaaccactcaatacagcgagagctggaggttcgagcgcgggataaggagagcaaactgagttttgttacctcatcactgcccaattccgcaagtattggaagcctttgcggaagccttggtgggaacatgaaaataatgaactatccacttggggtaaaatcgacactaaatgggacgttagcgacaaaccgcaataaaacaggtcgctactttgatgattatcaagttacaaatcatcaagtctgcttggtgctcagcaggttgactggcagtgaaccactcaaaactaacaagcaaagagataaagcacgcaatgtccaaagtaagatcttgagaaagcagatagcgctatggatgttgccattaattgaattgcgcgatcgagctaatttaaatccaagtgagcagtttttaaatagcctagattctttagcgagtgcatttttgacgttacccgagtcagagcttaaatcactcgcaacccaattcaatcaccgacttcactatgtgctgcaagaaaataaatttactcataagtttgcttatcaccccaaactattacaagtcattaagtgtcagatagtttgggtactgaatcagttgagtaagccgagcactagtgatgaaactactcaaagcgaacaatacatctatctgacttccatgcgagttcaggatgcggtggcgatgagtagtccatacttgagtggagcaccgtcacttaccgccctttggggctttatgcaccgttatcagagagagtttagtcagttaatcggtagcgactcatcattggagttctcaagtttttcttttttcgttcgtagtgaggatatacagtccacagccaaactgactgagccaaattcagtagcaactaaaagaacagtttctaatgctaaacgtcctacgattcgttctgagaggttagccgatttagaaatagatatggtgattcgagtcaagggtcacgagcgtttagcagaccacttcagcgagttaaaagcgtcgttaccaatggcttttgcgggaggatacttattccagcctccgatttcatctgaggttaactggctaaacatttttggcagccagtcagaagtgttccacgcgattaaaggagcaccaacatacgggcgttggttatacccaagcgagttgcagcccagtagctttgacgagcttgaattgcagatttcaagcgatgccgacattcatccagtttctctcggctatcatttgctggaaaaaccgacatttcgtgagaactcgataacagagtgtcatgcttatgcagagaacgcgataggggttgcaaaacgcgttaatccgattgaagttcgatttagtggtcgaggtcactattttgagcatgcgttttggtcgctagaatacagctacgcaactattcttatgaaaaactataggaattagatgcttatggatttgtgtagccagctgaattatgttcgttcactttccccaggtaaggcgtatttttactacttatcaaaagatggtgagatgtgtcctgttggtattgatagaacaaggttgcgagcaccaaaagcaggctattccgaggcttacaaaggcaacaatttttttgcaaaaaatgttgctccccaagacttggcttacgctaatcctcaatacattgaagagtgttatgttactccaggggttgatgatatttattgtgcattttctcttcgtatccgtgctaattctttgttccctgaagtatgtaataacgatgatgtacgcaatgcgttagtgtccttgagttcggtatataaggagcttaatggataccaagagctggcgcaccgttatgccaaaaatattctatcaggagcatggttgtggagaaataaagagtgtcgagcattatcaatcgaagtcacgactagcgaagaagagagaataattgttaatgatgcactgagactatcttggtatggacactgggatgaagagtcaacactaagccttgagcttttgatggcttatctaagccgagcgctatcagaccgttctgaatctttctacatggatattcgagcgaagctttctgttggttggggagatgaggtttacccgagccaagagtttttagataccaaagaggatggtattcctaccaagcagttggcaaccgtgaaactgagtaatggcaaagaaacggtggcgtttcatggtcagaaagtgggtgctgcgctgcaatctatagatgactggtggcatgaggacccagataaagttttaagagtgaacgaatatggtgctgatcgagagtatgtgatcgcaagaaggcatgtggcattagaaaatgacttttatcacctaatcaaaaataccgagagttgggtgaaggaaatgaacaaaacaaaagtgattccaaatgatgttcatttcattatgtctgtcttggttaaaggcggactctttaatggggcaagcggtaaggccaagtgagtgtgagtatgaacaaacgctatttcttctatatacgctatcttccagagcaggttgactgtggacttcttgctgggcgctgtattagccaaatgcacaagtttatggtcaataataaacaggctatgaatcaaataggagtgagttttccgtgttggtgtgcggattcagttggtaatagcatcgcctttatttctgaagataaagaccttttgatagggctaacatttcaaccttatttttctgtcatgaaggaagaagaactgtttgagttgtctgatgtacatcaagttccagaaggcgcaactgaattaagattcgtccgtaatcagacgataggcaaaagttttataggctctaaaaagcgaagaatgaaacgcagcattgctagagcagaactaacggattcacaatcattacccgttgcagatgaagatcgcgaggttgaacatttccatcgtattccaatttctagtggttcatctaggcaggacttcatcttacacgttcaaaaagaacacgttggcgagagcgtccctacaaactttaatagttatgggttcgccaccaaccaagataaacgaggaaccgtacctgatattcacatttaacctttaataaggagatatagcatgttcgatcaaaccaagaagtcatctcatgtgcacaacatctgtaagttcatgagcttgaagaatgatgcagttgttcgcactctgtccattttagagtttgatttctgttttcacctcgaatacaacgcagacatcaaaacctttacgtcccaaccttttggtttccactatcaattcaataatcgaaagtgccgatatacgcccgattttttggcgacagatcacgatgaacattcaactttctttgaagtaaaacactctagccagattctcaaacctgatttcagggaacgatttaaagagaaacaaagagttgcgttcaatgagtttaacagacgcttggttttagttactgagaagcaaattagaatgggaccaactttagataacttcaagctactacatcgttactctggattgcggaccgtgactgagtttcaaaagttagtgttggcgtttattcaacgtaaacaaatggtgaagttacaagaggtgtctttgtatttcggtttatcggagcaggacacacttatctctactctaccttggatctcttcggggcaagttaaaacaaacctcaataatattggctttggcctcgagacttacgtttggtgctaactatgccgtctgactccaataacatatttgggttctttgatgagtttgaggcttcagagggagagtcgcagcagcttccaatagagttaattcaagaacctattgaaatcttttccactattgatactcaatcaccaaaggtacagcaagaagttatccgccgtatcaaaatcatcgatttcgtagagaggcgcctaaaggggggatggaccgagaaaaacttgaatcctatcttgagtctcattgaaccagaattaaaacttactcccccgagttggcgaactttagcaacttggaaaaaatcttactttgaagcgggtaaagacccatgtgcacttattccgaagcatacgtttaagggcaaccgccaaaaagaaatggattcgcaatccttgattgatgaggcagttcagaacgtatacctgacacgtgaacgacttagcgtggcagaagcataccgatactataagagtcgagtgattcaaataaatcgcgggattgtcgaggggaaaatcaaaccaatttcagatcgttctttttataatcgaatacacgacttacctccgtatgaggtcgcgatcgcaaggtttggcaaacgatatgcggatcgggagtttcggtcagttggtcaacaggtagccgcgactaaaccaatggagtttgtcgaaattgaccatactccagttccagtgattttgatcgatgatgagttagagattcctttaggtcggccctatctgacgatgctatatgaccgcttcagtaaatgtatcgtaggatgcagtatcaactttagagagcctagttttgactctgtcagaaaggcgctattgaactcgctactagataagagttgggtaaagcaaaggtatccttctattgataatgaatggccttgccacggcaagattgactgtttagttgtcgataatggtgctgagttttggagtaaaagtttggaagattcgttacggcctctggtatcagacatccaatacagtcaagccgctaaaccttggcgaaagtcagggatcgaaaagctgtttgatcagatgaacaaagggttagtgaacgcactgcctggaaaaacgttcaccaatcctactcagctacaagattacaacccaaagaaggatgcggtggttagagtttccgtgtttcttgagctacttcataaatggattgtcgattattaccacatggcacctgattcaagagaacgtgacattccataccacaagtggaaccaatcggaatggactccctcttactactccggagttgagaaggagcagttgagagttgagctaggtttgcttagacacagaaccattggagtagcagggatcaggcttcataatctccactatcagtcctcagaacttattgaataccgtaaatattgggcgtctaacaatggcaaaaagctgtttgttaagaccaaaacagacccttctgacatcagctctattcatgtttatctggaatcggaaaagaggtacataaaagttccagcggtagacaacaccggatatacaaaggggctgtcgctttttgaacacgagcgaatacaaaaagtacgccggctcaatactaagcagcttactgatgatgaggcgcttgcggatacattcctgtatatgaagaaacgtattcaggaagaaaccgatagattccgcggtgcaaaaagcaataaggccagcttgcctaaaacgggcaatacttctaaattagcaaagtttaatgatgtgggatctgagggaccaagctcaatcaacgtgattcctgttacgcacaaatctgaggttgtttccgatgcctcagagtacttagatgacgatgattttgaagatattgaagggtattaatttgaatttaacgccaaagcagcttgagcagctaaagtcctttgaaaccagctttatcgagtatcccgcgataactgaaatctactctatctttgatcaacttcgtttcaatcactctttaggtggtgaaccagagtctttcttgttaactggtgaggctggaagtggaaagacggctttgatcaacaactacttatcacgctttcaatcgggttcaacttgggaaaaacagccagtgttaagcactagagtgccaagtcgtatcaatgaacagaatacgctgacccaatttttggttgatttagattgtaaatctggaggaagaggtattcggcgccgtaatgaaattgcgcttggcgaagcggttgtaaagcaacttaaacgtaaatctgttgagctgattattgttaatgaaattcaagagctggttgagttttcaaccgcagaacagagacaagttattgccaacacattcaaatatataagtgaagaagcaagagtctcgtttgtgctagtgggtatgccttatgctgatgtgatagcgacagaaccacagtggaactcgcgtctaagctggaggagaaagatagattatttcaaattgttgaaagcgaagagtcattctaatagaacggtatcttatgggtttgacttagaacaaaaaaaacattttgccagatttgtcgcgggtttgagtgcgagaatgggctttgatgaaccgccagtgcttacaaaaaatgaagtgttatatcctttgttcgttatgtgtagaggggagtgccgagcgttgaagcacttcttgaaagatgcactacttatgagtttcaatgagaacgtcgatacgataaacaaagcgatattgacgcgcacgttttcgtttaagtttccctatttggacaacccatttgactctcctgtagagcagcttcgccttcatcaaattgacgctggctctacttacaacctaaatgccattacagcagaagataagattctcgcgcctcgttttacagatgcaattccgttgagcatgttattgagcaaaatacgcttaaaacttagagtggctttcgtgatttagcctaggctgctgccaccgctgagcaataactagcataaccccttggggcctctaaacgggtcttgaggggttttttgctgaaacctcaggcatttgagaagcacacggtcacactgcttccggtagtcaataaaccggtaaaccagcaatagacataagcggctatttaacgaccctgccctgaaccgacgaccgggtcatcgtggccggatcttgcggcccctcggcttgaacgaattgttagacattatttgccgactaccttggtgatctcgcctttcacgtagtggacaaattcttccaactgatctgcgcgcgaggccaagcgatcttcttcttgtccaagataagcctgtctagcttcaagtatgacgggctgatactgggccggcaggcgctccattgcccagtcggcagcgacatccttcggcgcgattttgccggttactgcgctgtaccaaatgcgggacaacgtaagcactacatttcgctcatcgccagcccagtcgggcggcgagttccatagcgttaaggtttcatttagcgcctcaaatagatcctgttcaggaaccggatcaaagagttcctccgccgctggacctaccaaggcaacgctatgttctcttgcttttgtcagcaagatagccagatcaatgtcgatcgtggctggctcgaagatacctgcaagaatgtcattgcgctgccattctccaaattgcagttcgcgcttagctggataacgccacggaatgatgtcgtcgtgcacaacaatggtgacttctacagcgcggagaatctcgctctctccaggggaagccgaagtttccaaaaggtcgttgatcaaagctcgccgcgttgtttcatcaagccttacggtcaccgtaaccagcaaatcaatatcactgtgtggcttcaggccgccatccactgcggagccgtacaaatgtacggccagcaacgtcggttcgagatggcgctcgatgacgccaactacctctgatagttgagtcgatacttcggcgatcaccgcttccctcatactcttcctttttcaatattattgaagcatttatcagggttattgtctcatgagcggatacatatttgaatgtatttagaaaaataaacaaatagctagctcactcggtcgctacgctccgggcgtgagactgcggcgggcgctgcggacacatacaaagttacccacagattccgtggataagcaggggactaacatgtgaggcaaaacagcagggccgcgccggtggcgtttttccataggctccgccctcctgccagagttcacataaacagacgcttttccggtgcatctgtgggagccgtgaggctcaaccatgaatctgacagtacgggcgaaacccgacaggacttaaagatccccaccgtttccggcgggtcgctccctcttgcgctctcctgttccgaccctgccgtttaccggatacctgttccgcctttctcccttacgggaagtgtggcgctttctcatagctcacacactggtatctcggctcggtgtaggtcgttcgctccaagctgggctgtaagcaagaactccccgttcagcccgactgctgcgccttatccggtaactgttcacttgagtccaacccggaaaagcacggtaaaacgccactggcagcagccattggtaactgggagttcgcagaggatttgtttagctaaacacgcggttgctcttgaagtgtgcgccaaagtccggctacactggaaggacagatttggttgctgtgctctgcgaaagccagttaccacggttaagcagttccccaactgacttaaccttcgatcaaaccacctccccaggtggttttttcgtttacagggcaaaagattacgcgcagaaaaaaaggatctcaagaagatcctttgatcttttctactgaaccgctctagatttcagtgcaatttatctcttcaaatgtagcacctgaagtcagccccatacgatataagttgtaattctcatgttagtcatgccccgcgcccaccggaaggagctgactgggttgaaggctctcaagggcatcggtcgagatcccggtgcctaatgagtgagctaacttacattaattgcgttgcgctcactgcccgctttccagtcgggaaacctgtcgtgccagctgcattaatgaatcggccaacgcgcggggagaggcggtttgcgtattgggcgccagggtggtttttcttttcaccagtgagacgggcaacagctgattgcccttcaccgcctggccctgagagagttgcagcaagcggtccacgctggtttgccccagcaggcgaaaatcctgtttgatggtggttaacggcgggatataacatgagctgtcttcggtatcgtcgtatcccactaccgagatgtccgcaccaacgcgcagcccggactcggtaatggcgcgcattgcgcccagcgccatctgatcgttggcaaccagcatcgcagtgggaacgatgccctcattcagcatttgcatggtttgttgaaaaccggacatggcactccagtcgccttcccgttccgctatcggctgaatttgattgcgagtgagatatttatgccagccagccagacgcagacgcgccgagacagaacttaatgggcccgctaacagcgcgatttgctggtgacccaatgcgaccagatgctccacgcccagtcgcgtaccgtcttcatgggagaaaataatactgttgatgggtgtctggtcagagacatcaagaaataacgccggaacattagtgcaggcagcttccacagcaatggcatcctggtcatccagcggatagttaatgatcagcccactgacgcgttgcgcgagaagattgtgcaccgccgctttacaggcttcgacgccgcttcgttctaccatcgacaccaccacgctggcacccagttgatcggcgcgagatttaatcgccgcgacaatttgcgacggcgcgtgcagggccagactggaggtggcaacgccaatcagcaacgactgtttgcccgccagttgttgtgccacgcggttgggaatgtaattcagctccgccatcgccgcttccactttttcccgcgttttcgcaga

SEQ ID NO: 1905 - DNA, 11817 bp, Synthetic construct
  source 1..11817: mol_type = other DNA
aacgtggctggcctggttcaccacgcgggaaacggtctgataagagacaccggcatactctgcgacatcgtataacgttactggtttcacattcaccaccctgaattgactctcttccgggcgctatcatgccataccgcgaaaggttttgcgccattcgatggtgtccgggatctcgacgctctcccttatgcgactcctgcattaggaaattaatacgactcactataggggaattgtgagcggataacaattcccctgtagaaataattttgtttaactttaataaggagatataccatgggtgaactgccgaataggtagctgataatagtacagcgcggctgaaatcatcattaaagcggtgaactgccgaataggtagctgataattagcgaattccgagcgaaggagatatacatatgcttttacaaagacccaaaccacacagtaacgaaagtttggagagcttctttatccgagttgcaaataaaaatggctatgaagatgtgaaccgttttcttatggccacgaaacgttaccttcaagacatcgacttctcagggttccagaccttccctactaacatctgcaagatgaatcctgcgtcagccaaaagcagttccagtgcccgtacagcctcactcctgaaactcgctcaattaacgtttaacgaacctaccgagttacttggattagcagttaacagaacaaacttaaaatattctccatcaactagtgccgtgatccgtggctcagaagtttttcctcgcagtttactccgtacaaagtccataccctgctgcccattatgcttacaagaaaatggttacgcttcttacctttggcattttgagggttacgatcactgccatatccataatgtacctttactcaacagctgtcgctgtggtgctgagtacgactatcgagtgtctggtttaagtggaatgtgcggcagttgtgaagcacctatcgccataaagagtcgagaaaaaagtcataacgccacactctctgttgcgaattggctggcgggcaatgaatcaaaagatctgccagatctccctccaagctaccgttggggcttagtacattggtggattcatatcagcaatgatccgttcgagcacctttcgttcgtccaatttttctcgaactggccaagttcgtttcactccataattgatagtgagatcgagttcaatctggagcacgccattgtaggaaaaagtgaattacggataaaagatctcctggggcggatattgtttagttctgttcgtttaccagaacgcaaccttcagcacaatatcgttctaggagagcttctacggcatacagagatgcatttatgggataacaacggtctgatcgctaaccttcgtatgaacgctctggagactactgtattcctgaattgcagtaaggatgagttagcctcaatggtagaacagcgcatcttaaagccaaatcgtaaaactaagccaaacatacctctggtggttaacgactacttattttatttcggcgacatcttctgcctttggttagccgaatttcaaactgatgaatttaaccgctctttctatgtgtcgaggtggtaaatggagagtcttaaggagttactacaatcaagaccagatgatttgaacgtagagttaaagcgaacattccgccctcttactccacatatcaatatcgatggaaaggagcttgatgctctcactgtattagtgaacttaaccgacaaaacagccgttcaaaaagatctacttgatagggttaaatgcaagcaaaaacttagagacgaaaaatggtgggctcgctgtctaaaaacggttgaatacaggcaaagccacaacctaaaatttccagacatacgctctgaaggtgttattcgcgcgactcctctggggcagctacccgattttttactttcatcttctaaattagaaccacacaactgggcgtacagccatgattccagcgatgttaacaaaagcgctttattaaccaatgaatttcgctggaatggtgtaatttcatgccttggtgatttgcttaaagatgtagaacacccgttgtggcaaaaactcaatacgcttggctgctaccagaaaacacgtaaggctatcgctaaacagttggctcagatttctcaaacaacgattaacgtcagtctcgctccaaattacttaactcaactatctttgcctgataacgacagttcttatatttcactctcgccagtggcttctcaatcgatgcaaagtcactgttatcaagcgctaaaaaatgagtatcgctatacagcgttaacccgttacagtcgcagtactaacatgggagtattacctatgacctgtggtggtgctttgaagatgttgaaaactgtccctaacttttcccttacacatcattatcagataaacattggaaaatcttggttgacctcaagtcatattcaatcgttaaaacagtaccaaacgcatactcaatatttaatgccaaaaaacaagcgagtggcttaccgcagaacagtcaaaaacgagatacaagagatggttaaggcttggttggcaacacaagacaacacaatggatgttaatactcttgttcaacatttaaacgatgatctatcccgcttcaaatcagctaagtgtttcgcatacgagccgagcattactaaactcctgcttgggctcatcaagcgtgaactaaccgaacctacaaccgtttcaactaatatttgccgcagtgaaaaaaaggattcattctttgtgattccaaatataagagtttgtggagcaagcgcgttgagttcacctatcacggtcggtctgccatcactcactgctttcttggggtttactcacgcgtttgaacgtaacttaaatgagtcttttcctacgctcgcaatcgattcgtttgccatctgtgtccatcaactacacgttgaaaaacgcggtttaacaaaagaatatatacaaaaagcaaaccacaccatatcgccacccgctacatacgatgactggcagtctgatttggtctttagtttggtgattaggtttaatcgtagcttgaacgttgatgacaatactattgttcgtgctctgccgaaacggtttgccagaggttccgctaaaatagctattgcagatttcaaatacatccggtcattttcaacgttagaaaagacgattcaatcctttcctcagaaaaccggcaaatggctatcgatgcatactgaacctatcgaaaacatgagtgatattttatcggaagttaaagagaaccgaaaattaaccccaagctgtgttgggtatcattttcttgaggagccgaccgacaaacctaactctcttcgaggttataaacatgctttttctgagtgcatcattggtctgattgagccaatcacttttgatcaaaacaccgacataaatactattttgtggcatcacaagtgctatcaaaactacctttctgtgcagccaaggagtacctatcatggaactaccgactaacctagcctatgaacgctctattgatccttctgatgtgtgctttctagttgtgtggccagatgggcgaaagacccccttaacctacacttctcgtactgtactaggacaaatggaaaccgcagccttagcttatgagccgtcggggcggaccaaagagagtgcaaccgctgaaaagcttgctcaaggaaacccacatcaagtcgatttttgtcatgctcctttcggtgcgagccacattgaatgctacttttcggtttctttttcttctgagctacgcaaaccttacaagtgtaattcgtctacggttaaacacacactaatgcagctaatcaaagcgtatgaagaaaatattggatggaatgaattggtttctcgttatctagtcaatatatgtaatggatcatggctgtggaaaaatactaaaaaagcctattgctgggatatagagttaaccccttggccctgggcgggaggtgctgtcaaatttcaaaacataagggctaactaccttgaaagaagtgactttgagaaccataaagattgggaagctattgctcaaatgaccaaaaatgctttttctcactctaatggtttggccatatttgaagtaaaagccaccttgcggctaccaaccaataaacagattttcccgagccaagcattcaccgaaaatgaaagtaacaacactaataaatctaagaaacaaagcaagggacgaatttttcaaagcacaacggttgacggtgaacggagcccaatattgggtatttataaaactggtgccgccattgcgaccatagacgactggtatcccgatgcaactgaggcactacgtgtcggccggtttggggttcataaagaagatgtcacttgctaccgtcacccttctacacaaaaagatttcttttttatacttcagcacacagagtcttatattgaagcactcacgtcctcagataaaccaaatcaagaaaccataaacgacctgcattttttggtcgcaaatatcatcaagggtggaatgttccagcataagggaaattaagtatgaagtggtactacaaaacggtcacttttctgccagcgcgttgtaacaatgaatcattagccgctaagtgccttcggattcttcatggctttaactatgagtatgaaacaagaaatattggcgtttcatttcctctttggagtgactataccatcggaaataaaatttcttttgtgagcacaaataaaatcgaactcgatttgctactcaaacagcactacttcacccaaatgaaagagctgcactattttgatatatcaaatacaaaggttgtccctgacggctgcgagtatgtttcatttaagcgttgccagtcaatagacaaagcaacacctgccggacaagctagaaaagcgaaaagattaaaaaaacgtgcggaagaaagaggtgaagtgtttgacttatcctcgttcaaacaacacgaagttgttgcactccatcactaccactcacttgaggaggacagtaaaagtcgtggaggtagttttcgactcaatataagaacattcaaagaagctcgcttagacggagatgcactatttagcagctatggtcttgcgaatactggaaacaaatctcaacccgtccccctaatttgacctttaataaggagatatagcatgaaaaaacggattcttagaaactcgtcagtaaaaaacatctcacgctttgtcagtctcaaaacgaactctatccatacagtcgaatccgatttggagtttgacgcatgtttccacttcgagttttcgccacagattataactttcgaggcgcagcctatcggttttgaatattttatcgaaggtaaggtgcataggtatacgcccgactttttagtcacatacaaagattcataccaatcattttatgagataaagcccaagcacattgcagaaaaagatgagtttaaagaaaagtttagagcccagaaagaacaagcattgggcgacggtaaagacctgcacgtattgacagatgatgatattcaaatatacccattgctcgataacttgaggatcattcatcgttatgcttgcgatgagcgtcttaactctattcaaagaaatatattgaatctatttaagaaatatggagaactcaggatagagcaggttgttcaatattcttcagttcattcttctcagttattaccctcactttatgatttgattgctaggcagttgttaagtattgatatgcaccagcctattggttggcaaagccctatttggagttcttaggcatgccaagtgaaggttctaagcgatttggcgagctatttcctagtaccaacttcgataatgaatcgaaaccaaaggaaacgctatcactccccttatggaaagatgttgatctgacgtttaaggatgtcttttctgttgatgaggaccgaagaaatgaggccatacatagatataacattctcgagttccttatagatcaatatggaaccgatttttcaaaaaagcaaatagatgagtcacttactgctttaatagataaatttggttcaagtacaccatcagcaatcagcatttataggtactggagagattttaaaaaatcaaattttcagcttaactccctaattcctaaagtctctgctggcaatacaaaaagaaatactcccgatgaacttgaacctttaattcaaggtgcaataagaaattacttttctgaagaatgcccgacagcaacatcggcatacgtaactcttgaggttgaaattgatcggcataacgaaatcaatggaactcaatttgaaccgttctcaatacaggcatttaggaagagactaaggaagcactctgagtacgaaaaaatattacttagaaagggaaaaagtgtagctgattctactttcagaaaagtgggggaaaggccagcaacaacacgagtattggaacgtgtagaagcggaccatactaggcttgatttatttattattgatgaaaaaaacggtataccgttagggcgaccctggctcacagttttgtacgatactcatacaaagagcattgtgggtttctatctagggttcgagccgccgagttacttatcagtatcactggcacttgtgaatgcaattcttccaaaagaacacgtcaaagaactatacccatcagtagaagggtgttggccttgttatggcttacctgagcatttgattgtcgataatggtactgagtttaacagtagtgacttcaaaatagcgtgcaaagacctgaaaataaaagttaagaaaaacccgactaaaaagccttggcttaaagggtcagtagagcgatattttcgtactatcaataatcgatttctctccagaatgccgggtaagagttttactaatatatttgagagaaaagattacgatccactcaaaaatgcagttattgataattcgcttctgcaagaaatggttcatatctggatagtggatgtttaccaaaatggaaaaaacgggctagaaaacaatatcccaaatctaagttgggtcgatgctgttaattcttcaattcccccacgtcctttcaaagggtccagagatgaattgaagtttaacctgggaaaaaaccgtgaggtatctctcgataagaatggggttaggttaggcacaacaatacgctactccagtgttcgtctagcaagatattttggacacaaaacttgtaaagacatgaaaagtgtacgtgtgaggatcaagtatgatcctagttgtcttggtagggtttatgtacttgatgaaacgaaagaagagttttttgctgtagacgcaatcgatgctgattacgcctattctgtttctgagtggttacacaagacttgttgtaactatgcaaggcgacatattcgcaagaactacaaccacagagatgttgttaaggcttggcgtaaaattctcgatattattgatgaagcatttgaaaaaacaggtcaaaataagaaacaaaactctctagggactacaactacatctcgggtgcagcgtataaaagagcattctaaaagagcaacttccgaagcaaaaacacaacaagttgattatgtaaaatcagaacttgatgatgaattagattgggacatcgaggttaatactaatggttggtcgataaagtgattttattcaaaaaggctaactgacatggatagtaataaaacagaaagcacagctgagatggtcaaacaaatcttcattcagagcccgctaataaccgacattcttgatgatatttcagattgccgagaatttagtgacggtattcatgaaccagactgtatgatcgttgtgggagatactgggtccggaaaaacaacgctgataaataagtatttaaacgaaaaccctcgttcagagacaagcgaaggttcttttataccgattttatcgacttctctcccacccaatgcgaccccgattacggcttctgagcagttgctatctgatctaggggacccactcgctttttccagagggagtgatcctgtcaaggtcgcccaagaaatgagtgacttaatgaagtcatgcggagttgaattaattatcatagatgagtttcaacacatgatagatcggaagaataagcaaattttacatagtgcagctgactggttgaagatgctcattgtacgttcaaaggttccagtggtgctttttggcatgccttactcagtggtaattttggaggcaaatagtcaattagcaggacgcttcgagttacagcacactcttgagcctttccggttgaatagcaaaaataaccgtagtatctataaaacgtttttaacaatgcttgatgacgcattaccttttggtgagtgttctggtcttgctgaacctgacatgatgaagcgtatctacgcattttcccaaggtaatctacgtcgtatcagaaaactcattaatagagcgagtaggcttgcattacgtgatcattcaaataaagttgcattaaaacactttgccaaagcagcacccaaagtcagccaggtcgcatgtgaaaatctaaatccttttgaagttactattaaggaattgaagatcaatcatccccctcaagatattgggtgggaaaattatctgtttcaacaagaaaaagacgtatcggcaaaaggtttattttgacctaggctgctgccaccgctgagcaataactagcataaccccttggggcctctaaacgggtcttgaggggttttttgctgaaacctcaggcatttgagaagcacacggtcacactgcttccggtagtcaataaaccggtaaaccagcaatagacataagcggctatttaacgaccctgccctgaaccgacgaccgggtcatcgtggccggatcttgcggcccctcggcttgaacgaattgttagacattatttgccgactaccttggtgatctcgcctttcacgtagtggacaaattcttccaactgatctgcgcgcgaggccaagcgatcttcttcttgtccaagataagcctgtctagcttcaagtatgacgggctgatactgggccggcaggcgctccattgcccagtcggcagcgacatccttcggcgcgattttgccggttactgcgctgtaccaaatgcgggacaacgtaagcactacatttcgctcatcgccagcccagtcgggcggcgagttccatagcgttaaggtttcatttagcgcctcaaatagatcctgttcaggaaccggatcaaagagttcctccgccgctggacctaccaaggcaacgctatgttctcttgcttttgtcagcaagatagccagatcaatgtcgatcgtggctggctcgaagatacctgcaagaatgtcattgcgctgccattctccaaattgcagttcgcgcttagctggataacgccacggaatgatgtcgtcgtgcacaacaatggtgacttctacagcgcggagaatctcgctctctccaggggaagccgaagtttccaaaaggtcgttgatcaaagctcgccgcgttgtttcatcaagccttacggtcaccgtaaccagcaaatcaatatcactgtgtggcttcaggccgccatccactgcggagccgtacaaatgtacggccagcaacgtcggttcgagatggcgctcgatgacgccaactacctctgatagttgagtcgatacttcggcgatcaccgcttccctcatactcttcctttttcaatattattgaagcatttatcagggttattgtctcatgagcggatacatatttgaatgtatttagaaaaataaacaaatagctagctcactcggtcgctacgctccgggcgtgagactgcggcgggcgctgcggacacatacaaagttacccacagattccgtggataagcaggggactaacatgtgaggcaaaacagcagggccgcgccggtggcgtttttccataggctccgccctcctgccagagttcacataaacagacgcttttccggtgcatctgtgggagccgtgaggctcaaccatgaatctgacagtacgggcgaaacccgacaggacttaaagatccccaccgtttccggcgggtcgctccctcttgcgctctcctgttccgaccctgccgtttaccggatacctgttccgcctttctcccttacgggaagtgtggcgctttctcatagctcacacactggtatctcggctcggtgtaggtcgttcgctccaagctgggctgtaagcaagaactccccgttcagcccgactgctgcgccttatccggtaactgttcacttgagtccaacccggaaaagcacggtaaaacgccactggcagcagccattggtaactgggagttcgcagaggatttgtttagctaaacacgcggttgctcttgaagtgtgcgccaaagtccggctacactggaaggacagatttggttgctgtgctctgcgaaagccagttaccacggttaagcagttccccaactgacttaaccttcgatcaaaccacctccccaggtggttttttcgtttacagggcaaaagattacgcgcagaaaaaaaggatctcaagaagatcctttgatcttttctactgaaccgctctagatttcagtgcaatttatctcttcaaatgtagcacctgaagtcagccccatacgatataagttgtaattctcatgttagtcatgccccgcgcccaccggaaggagctgactgggttgaaggctctcaagggcatcggtcgagatcccggtgcctaatgagtgagctaacttacattaattgcgttgcgctcactgcccgctttccagtcgggaaacctgtcgtgccagctgcattaatgaatcggccaacgcgcggggagaggcggtttgcgtattgggcgccagggtggtttttcttttcaccagtgagacgggcaacagctgattgcccttcaccgcctggccctgagagagttgcagcaagcggtccacgctggtttgccccagcaggcgaaaatcctgtttgatggtggttaacggcgggatataacatgagctgtcttcggtatcgtcgtatcccactaccgagatgtccgcaccaacgcgcagcccggactcggtaatggcgcgcattgcgcccagcgccatctgatcgttggcaaccagcatcgcagtgggaacgatgccctcattcagcatttgcatggtttgttgaaaaccggacatggcactccagtcgccttcccgttccgctatcggctgaatttgattgcgagtgagatatttatgccagccagccagacgcagacgcgccgagacagaacttaatgggcccgctaacagcgcgatttgctggtgacccaatgcgaccagatgctccacgcccagtcgcgtaccgtcttcatgggagaaaataatactgttgatgggtgtctggtcagagacatcaagaaataacgccggaacattagtgcaggcagcttccacagcaatggcatcctggtcatccagcggatagttaatgatcagcccactgacgcgttgcgcgagaagattgtgcaccgccgctttacaggcttcgacgccgcttcgttctaccatcgacaccaccacgctggcacccagttgatcggcgcgagatttaatcgccgcgacaatttgcgacggcgcgtgcagggccagactggaggtggcaacgccaatcagcaacgactgtttgcccgccagttgttgtgccacgcggttgggaatgtaattcagctccgccatcgccgcttccactttttcccgcgttttcgcaga

SEQ ID NO: 1906 - DNA, 12072 bp, Synthetic construct
  source 1..12072: mol_type = other DNA
aacgtggctggcctggttcaccacgcgggaaacggtctgataagagacaccggcatactctgcgacatcgtataacgttactggtttcacattcaccaccctgaattgactctcttccgggcgctatcatgccataccgcgaaaggttttgcgccattcgatggtgtccgggatctcgacgctctcccttatgcgactcctgcattaggaaattaatacgactcactataggggaattgtgagcggataacaattcccctgtagaaataattttgtttaactttaataaggagatataccatgggtgtcctgccgcataggcagctaagaagtacagcgcggctgaaatcatcattaaagcggtgtcctgccgcataggcagctaagatagcgaattccgagcgaaggagatatacatatgaaaacggacattcaactttaccctgacgaatcgctcgaaagtttcttgttgcgcttatcgcaagagcaaggttacgagcgattttctcatttcgccgaagatatttggttcgacactatggatcagcatgaggcgattgctggtgctttccccttagaactcgaacgagtcaatatctaccacgctcaaaccacaagccaaatgcgggtgcgagtgcttatccaccttgagaaccaattaaagctcaacaactttggtgtactgcgtctagcgttatcacattcaaaagctcaattctctccgcaatacaaagctgttcatagatttggtgttgactacccttatgcttttcttcgcaaacgcttcacgcctatttgccctctgtgtattggtgaagctccctacattcgccagcagtggcaatttatctctcaccaagcctgtgaacatcatggctgtaaactgatttatcactgccctgagtgtaagtcgagacttgaataccaacgtaccgagagtagtagtcaatgtgaatgtggtttcgagctgcgaaactcgccagtcgaagatgctccagaggctgaaaccttggttgcccgatggttgtcaggaaatgattcaaaacccttgggattgctgaaggcagaaatgacgttatctgagcgctatggtttcttactttggtatgtaaatcgctatggtgacatcgatggactctgttttgagtcattcatcgaatactgcggctcttggccaacgtcattgtggcaagacttcgatgttttgaaagagaaaacagaactcgtccgagcaaaagattggaagaagatgtttttcaatgaggcttttggtgctctgcttaaagattgccgtcagttacccagtcggcagctgagtcacaatatcgtgcttactcaggtgttagcttactttacacagctgatggcaacagtatcttcaagcgcgaaaggtaatataggtgatgtgctgctcagccccttagaggcttctacattgctttcttgtacaacagatgaggtatatcggttgtatgagtttggtgagatcaaagccgcgatcaggccgcgaatgcacacaaagattgcaagtcacgaatcggcgtttactctgagaagtatcattgaaacaaagttgacgcgaatgagttctgaaagtgatggtttaagcgtgtatctaccagagtggtaattatgacaaaattaagtgacctattggcaatcgaggacgaagtagtaaagcaggcttctcttaagaagatgttcatgccctatacggaagatgtctgtgttgaagggtttgaaaaagaagcgctaacgatcttgctcaatctcagttcaagccatcaagcggatagatgctcggattggttagatgttgcccgtgctaaaaggtattttaaagcggctgagaacctagacacatcccttgatgagatcaaatggttccacactcataatctcaagtttccagactgccgagttaaagatcagcgaataattgcgcagcctcttgtgacaaccgaggcatttatttcaagcgcagcattagagcaacgcttggggtgggcgcataactctgcggtgtatcgccatacattgtggttattgaatccttttcgttggcaatcacagtccgtgagtctgctttcacttattcagcaagaaacccctgtttggctcgaactgcttaaaggttttggtttaggcactaagtcacttgttcgcttacaaaacacaatggcagaacagctacctgaaaatagcctccctgacagagtcagtacttacagcaagcaactacggtttccgtggggggatgattatgtttcggtgacaccagtggtcagtcatgccatccaaagagagttagaagtgagatcgagaagtcgagaaagcaaactcagctttgtgtcctcatcgctgccaaactcggcaagtatcgggaatctgtgtggcagtttaggtgggcacatgaaagtccttaactacccgctagacgtcaaaccagcacaaggtgggacgttaactgaaagtcgcaaaaagagtggctgctactttgatgactatcaggtaactaacgccaaaatttgtcaggtgttaaatcacttaattggatcagaaccatcaaaaacacagaagcaaagagagatcgctcgtaaggttagaagtaagatattgcgaaagcagatagccttgtggatgcttccattaattgagctaagagatattgttgatgctgaccctaatcaacagcaattagaacatgatgacactttaactcaagccttttgggcgctaccagaatcggatctaggctctttagctagtgagtttaactgtcgcttacatctcgcgtttcaaaataataagtttgccgcaaagtttgcctatcaccccaaacttatgcaggtcgtcaaagcccaaatcgtatgggtactcgaacaaatcagtaaaccaaatggcaatgaagataaggtaacgggtgagcagtatatctatttgtcatcaatgagagtgcaagatgcggtcgcaatgagtagcccatacctatgtggtgctccttctttgacggctatttggggttttatgcatcgctatcaaagagagtttaataaactagctaattgtgattccctgtttgagttttcgagtttctctttttatgttcgtagtgagaacattcaaccgacggccaaacttaccgaacccaactcagtcgccaaagcgcgaacggtttctaacgcgaagcgaccaactattcgtagtgaacgattggcagacctagaaatagacttagttattagagtccatagtgacagccgaatttcagattttaagtccgcgcttaaaacagcacttcccgtagttttttctggaggggcattataccaaccacagctatcgacgcagattgagtggctaaggacgtttaccagcaggagtgagcttttccatgtcataaaaggcttaccagcatacgggcgatggttatatccaagtgaaaaccagccgagtgattttgatgagctagagcgttttattactaaagacgctgataatttgccagtttctattggctaccatttgttagaacaaccaactaaacggggcaactcaatcaccagttgtcacgcttatgcagagaatgcgatagggcttgctcagcgagtaaacccgatagaagtacgttttagtggaagagatcactttttaaaccacgccttttggtcgatagaatgcagtagcgaaactattcttataaaaaactatagggattaattgcttatggaactttgcactcagctgaattacgttcgatcactctctgctggcaaagcatatttctaccatctttctaaaagtggtgagatgtgtccccttgaagttgatagaactaggttgcgcgcaccaaaagggggttatgcagaagcctataaagggggcaagtttgtaaaaaagaatgttgctccacaagacttagcttactccaatcctcagttcattgaagagtgttacgtaaagccgggtgtagatgacatctactgtgcattcccccttcgtattcgagccaattctctaacccctgagatctgtagtgacgatgaagtgcgcagtaagctttcgttactggctaacacttataaagaactcaatgggtatcaggaactcgctcatcgatacgcgaaaaatatcctgcttggcagttggctgtggcgtaacagagagtgtcgaaagctgttgatagaagtgaccaccagtgattcacaaaccctgattgtagaaaacgcaacaaaactttcttggtatggtcattgggatgaggcttcagcagaatgcctagaaaagctcacagcctatttgatgcgagccctgtctaacccgaccgaatatttctatatggatgtcaaagctaaaattggagttggttggggagatgaggtttacccaagccaagagtttttagagagccgagaagatggtgttcctactaagcagttagctactgtcgaactattggacggaaaagaaaccgttgcgtttcatggtcaaaaagtgggagccgcgttgcaatcgattgacgattggtggcatgaaaacgcagataaacccttgagagtgaatgagtatggaactgaccgagagtacgttatagcaaggcgacacgtttcctatggaaatgacttttaccagttagtcagaaatacagagaattggattgagacaatgacagcttctcagaccatcccaaatgacgtgcactttattatgtcggtcttgattaaaggtggactcttcaactgttccaaagcgaagtaaggatgactatgacgacgcgttactacttctgtatacgttatacccctgttcaagccgactatgagctgttagcaggacgttgtatctctcaaatgcacttgtttatggtcaataaccgacaagccatcaataaaataggcgtgagttttcccgactggagtgatgttacggttggtcaaaccatagcctttgttgctgaagataaagagatgatggtaggactctcttttcaaccctatttttctttgatggtaaatgaaggtttatttgagatttccagtgtatgtgaggtgccggatactgcgatagaggtgaggtttacccgtaaccaaacgattgggaaaagttttctgggttccaagaaacgtcgaatcaaacgtagcatggcgagagccgaactatctggtgttgaaccatcgttaccagccactaatgaggagcgtgtcatcgatagttttcatcgaataccaatctccagcggttcatctggagaagattatatgttgtttgtacaaaaggagtttgtcggtgagcgcggtacagcaaactttaatagctatggtttagccaccaatcaagaaagaaaaggcacggttcctgagttacgtttttaacctttaataaggagatatagcatgtacgaccaaaccaaaaaatcatcagctgttcacaacatttgtaaattcatgagtttgaaaaatgactcagttgttcgtacaatgtccatgcttgagtatgatttttgttttcatgctgaatacaatcctcaaatagttagatatgaatctcagccacatgggtttgagtactacttcaatgggcgctattgccgctacacaccagactttcagcttttcgatagcatagatacgccttctctgattgaagtaaagcattcaagtcagatccttaaaccagattttcgagcaaggtttaaagaaaagcagcttgtcgctcaagctgagtatggaaaaaaactcatcttagtgaccgagaagcagattcgtactggttttctacttagtaaccttaaattactccacggctattcagggattcgtacaatcactgatattcaaaagcatgtgcttcagtttgttcaagctaatagaagcgtgacccttcattatctttcacaccaacttaaaatctctccagatgaaacattaacagcagctttgtgctggctatcttccggagaaatacaaacagattttaatcagaaaaaatttgatttggaaagttctgtttggtgctaggcaatgagtaatgatgctctctttggttttcgtgatgaatctagtagtttcgacaatgatgtagcagatgataaaacgcttcctacagaatttttagcagaggacgaaaatcttgaattggcatttggtgatctaccacacaaagagactgcattgtatcgtttggacttaattcgttatttggaaaggcacgtacaaggaggatggacgcccaaaaacctagataagctcttggaagagtatgctttattgaagaaaacttcggtcccgtcatccagaacggttgctgattggaaaaagctctattacgagtcaggtaaagatgtagcgtctcttgttcctgggcatagcaaaaaaggaaacagaatactaaagaatgattcatctgatttagtaacagaagcgattcaaaccaagtttctgaccaaagagcgagtatcagtcaacaccgcctatgagtactacaaatatcgagttattgaagagaaccgacaattaacgcaaattaaaatagcgacaatttcacaacggacattttacaatcgtgtaaatgcactacctccctatgaagttgctttggctcgttatggtaaacgatatgctgataataagtttaagactgttgggtcaatcattccggcaacgcgtccaatggaatgtgtagaaatagatcacactacagctcctgttattttgcttgatgatgatttggatcttcctcttggcagaccacacttaacaatcctttatgatagatactctacttgcattgttggtctttctgtcaattatagagatcctagttacgagacagtacgagcagctttcctcaattcagttctcaagaaggattgggttaaagaaaagtacccaagcattaaatctgaatggccttgctacggaaatattacaaatttgatagtggataacggtgcggagttttggagtgatagcctagagtcagcattaaagccattagtaacagatattcaatataatcaacgtggtaaaccgtggcgaaaagcgggtgttgaaaagtcttttgataccttctataagaaactatttagtcgtttcccaggaaaaaccttcacgaaccctactcagttaaaagactacaacccgaagcgagacgctgtcattaatgtgtctgattttctcgaactgttacataagtggcttattgacgtttatcataaaaaagctgacacgaggtacaagagagttccctaccagaaatggacagagtcgcaaggaaagataatcttttgtgaaggccctgaagcagagcaattaaagattgagcttggagttgtaaaccatcggactataagaagaggcgctattgaattgcattctcttaaataccaatctgatgaattggaagagtacggtaagcagtattctagtcgtgcaagaaaaagcgcttatgtgaaaaccaagacagacccaaacgacatcagctcgatttacgtttatctcgaggaagagaaaaaatacatcaaagtcccagcagtcgatcatacgggttatacaaaaggccgatctttatatgaacatcaacggattaacagtttaagaaggttgaaagttcgtttgggagagcaagacgaatcactagccgatgcgtcattgtatttggacagagctatggatgaagcaatagaacgtatgagtcgttctaagtccaaaaaatcggcgcttcctaaaacaactcatgcttcaaaaatagcaaagcaaagaggtgttggtagcgaagggcctagcaccattgtcattacgtcacctaaacctatcagtgaagtaccaaaagaagtaatagatattggtactgctagtgatgacctcagcgatatagaggggtattaatgaacatacttagtgagcttcaaatagagcaatatacatcttttagagagtgtttcttagaataccctcagctgacggaaatttataacgtctttgatcgaatggtattgaacagctgtcttggaggggaacaagagtcactattgctaacgggagatacaggtgttggcaagacggcgatgatagataattatgttgcaaggttcgctgctaagggtagccgctgggctgaaatgccagtattaaaaactcgcatcccaagtaaagttcgtgagcaaaatacgttagaaagattattaattgatttagatagtcgagcctctagccgccgcaggcgtccttacaaagaaggagcgttagaacaaggagtcatcaaaagtttagttgaaaaaaaagtgaagctggtgatcgttaatgaggttcaggagctgatggagttcaaagatgctaatgaacgacaaacaatagcgaatacttttaagatgataagtgaggaagctcaagtttcatttgtcttggtgggtatgccctatgcgactatgctcgctgaagaggaccaatggaactctcgtttaggctggaagcgacacttgagttattttcacctttctaagctgagcgaagccgataacaaaggttatatacctgatgcagaagggaaacggcattttgcaagttttgttgccggacttgcaggccggatggggtttgaaaaacgccctaacttaactggggatgaaattctattgcctttattttcagtctgtcgcggagaatgccgtgtgctgaagcactttcttgcggatgcgttactcaacgcattgcaatcttcaaaggatacgattgataagccattattatcggcttgttttgatactaaatacccttatgcgaaacagaatcctttcgagtgtaagttaacagaactcaagctagtagaactgaaaacagaaacttcttacaacaaaggtgctcaatttaaagaggaccgattaataggtcggtcatttactgatttattaccagttcacatgttgctgagtaagacacctttaaaagctcagtgacctaggctgctgccaccgctgagcaataactagcataaccccttggggcctctaaacgggtcttgaggggttttttgctgaaacctcaggcatttgagaagcacacggtcacactgcttccggtagtcaataaaccggtaaaccagcaatagacataagcggctatttaacgaccctgccctgaaccgacgaccgggtcatcgtggccggatcttgcggcccctcggcttgaacgaattgttagacattatttgccgactaccttggtgatctcgcctttcacgtagtggacaaattcttccaactgatctgcgcgcgaggccaagcgatcttcttcttgtccaagataagcctgtctagcttcaagtatgacgggctgatactgggccggcaggcgctccattgcccagtcggcagcgacatccttcggcgcgattttgccggttactgcgctgtaccaaatgcgggacaacgtaagcactacatttcgctcatcgccagcccagtcgggcggcgagttccatagcgttaaggtttcatttagcgcctcaaatagatcctgttcaggaaccggatcaaagagttcctccgccgctggacctaccaaggcaacgctatgttctcttgcttttgtcagcaagatagccagatcaatgtcgatcgtggctggctcgaagatacctgcaagaatgtcattgcgctgccattctccaaattgcagttcgcgcttagctggataacgccacggaatgatgtcgtcgtgcacaacaatggtgacttctacagcgcggagaatctcgctctctccaggggaagccgaagtttccaaaaggtcgttgatcaaagctcgccgcgttgtttcatcaagccttacggtcaccgtaaccagcaaatcaatatcactgtgtggcttcaggccgccatccactgcggagccgtacaaatgtacggccagcaacgtcggttcgagatggcgctcgatgacgccaactacctctgatagttgagtcgatacttcggcgatcaccgcttccctcatactcttcctttttcaatattattgaagcatttatcagggttattgtctcatgagcggatacatatttgaatgtatttagaaaaataaacaaatagctagctcactcggtcgctacgctccgggcgtgagactgcggcgggcgctgcggacacatacaaagttacccacagattccgtggataagcaggggactaacatgtgaggcaaaacagcagggccgcgccggtggcgtttttccataggctccgccctcctgccagagttcacataaacagacgcttttccggtgcatctgtgggagccgtgaggctcaaccatgaatctgacagtacgggcgaaacccgacaggacttaaagatccccaccgtttccggcgggtcgctccctcttgcgctctcctgttccgaccctgccgtttaccggatacctgttccgcctttctcccttacgggaagtgtggcgctttctcatagctcacacactggtatctcggctcggtgtaggtcgttcgctccaagctgggctgtaagcaagaactccccgttcagcccgactgctgcgccttatccggtaactgttcacttgagtccaacccggaaaagcacggtaaaacgccactggcagcagccattggtaactgggagttcgcagaggatttgtttagctaaacacgcggttgctcttgaagtgtgcgccaaagtccggctacactggaaggacagatttggttgctgtgctctgcgaaagccagttaccacggttaagcagttccccaactgacttaaccttcgatcaaaccacctccccaggtggttttttcgtttacagggcaaaagattacgcgcagaaaaaaaggatctcaagaagatcctttgatcttttctactgaaccgctctagatttcagtgcaatttatctcttcaaatgtagcacctgaagtcagccccatacgatataagttgtaattctcatgttagtcatgccccgcgcccaccggaaggagctgactgggttgaaggctctcaagggcatcggtcgagatcccggtgcctaatgagtgagctaacttacattaattgcgttgcgctcactgcccgctttccagtcgggaaacctgtcgtgccagctgcattaatgaatcggccaacgcgcggggagaggcggtttgcgtattgggcgccagggtggtttttcttttcaccagtgagacgggcaacagctgattgcccttcaccgcctggccctgagagagttgcagcaagcggtccacgctggtttgccccagcaggcgaaaatcctgtttgatggtggttaacggcgggatataacatgagctgtcttcggtatcgtcgtatcccactaccgagatgtccgcaccaacgcgcagcccggactcggtaatggcgcgcattgcgcccagcgccatctgatcgttggcaaccagcatcgcagtgggaacgatgccctcattcagcatttgcatggtttgttgaaaaccggacatggcactccagtcgccttcccgttccgctatcggctgaatttgattgcgagtgagatatttatgccagccagccagacgcagacgcgccgagacagaacttaatgggcccgctaacagcgcgatttgctggtgacccaatgcgaccagatgctccacgcccagtcgcgtaccgtcttcatgggagaaaataatactgttgatgggtgtctggtcagagacatcaagaaataacgccggaacattagtgcaggcagcttccacagcaatggcatcctggtcatccagcggatagttaatgatcagcccactgacgcgttgcgcgagaagattgtgcaccgccgctttacaggcttcgacgccgcttcgttctaccatcgacaccaccacgctggcacccagttgatcggcgcgagatttaatcgccgcgacaatttgcgacggcgcgtgcagggccagactggaggtggcaacgccaatcagcaacgactgtttgcccgccagttgttgtgccacgcggttgggaatgtaattcagctccgccatcgccgcttccactttttcccgcgttttcgcaga

SEQ ID NO: 1907 - DNA, 12025 bp, Synthetic construct
  source 1..12025: mol_type = other DNA
aacgtggctggcctggttcaccacgcgggaaacggtctgataagagacaccggcatactctgcgacatcgtataacgttactggtttcacattcaccaccctgaattgactctcttccgggcgctatcatgccataccgcgaaaggttttgcgccattcgatggtgtccgggatctcgacgctctcccttatgcgactcctgcattaggaaattaatacgactcactataggggaattgtgagcggataacaattcccctgtagaaataattttgtttaactttaataaggagatataccatgggtaacctgccggataggcagccaagaatagtacagcgcggctgaaatcatcattaaagcggtaacctgccggataggcagccaagaattagcgaattccgagcgaaggagatatacatatgcttaatccaatagagctttatgaagatgaatcgctagagagctgtttattaaggatcagtcagaataattgctatgattcatttcaggattttagcgatgaagtttggtttcaagtcaaagaagaggatcgtgaggttcgaggaactttccctgcaaccctaaatacggtaaatatctatcactctcacacatcaagtgacttaaagctcaaagcactaattaaaattgagcagtggcttgagataaataactcccctttattaaaaagcgccttgagcagatcaagcagtactttcttacgccaacattctgctgtttttagaaatggtgttgatataccaagaatcctgctcagaaaaaatggtattccagtatgccctgagtgcctaaaagagaacgaatacatacgtcaagaatggcacttcatcactcacgatgtatgcacaaggcataaaataggtctattacatcactgcccagagtgtaaagcctctatcaattatcaaaaaattgaaaacattacggtttgtcagtgtggattcaaattcagtgatcacttagctccgcaagcaaatagcaatgccttactcattgcacaatggcttaacggcgaaaatactaaattagctaatatttggggagaacaccaagcaatatcatctcgctttggtgtcttactttggtatatcaatagatataatctgacagatgatttttctacttcatttgtaaaatattcattgaattggccctcgaacttctattccgaactcgatgagcaaatagataaagctaaaacagttcagattaaaccatttaataagatattttttaatgagatatttgataacctgttattagattgccaacgcttacctacacgagaatttaaaacgaatcccatattaagtcatgtatatcagtactttctatctcgctaccaaattcaacctaactctgatgttttctcaatcttgctaagcccattagaggcatcgagcttgctttcttgcactaccgatcaaatctatcgtttatatgaattaggttttcttaaattaggcgttaggccaaaactgcatcaaaaaatagcaagtcaccaatcagtttttacactctcaagtattattctagtcaaactttcaaacatgcaatccagtcaagatgaattgcatcactacctttcagcgtggtaactaatggaatttacagatattctcatcattcaagatgtaaaggaacgcaacagagctttcaaggttgcatttgctcactactcttcagctatttttattgatgatcatgaagtcgaagcgattacatgcctacttaatttgtgtacgccaaaaacggaggattacctagacaaaactagcgcatctctgtttttaaataatcatgataatattcaaaagtgtcttgacgaacttaagtggttccatagtcacaatgttaaatatccagattgccgagttaaggggcaaagcattatttctttaccaatcgattcagtaagtaacaccataaacagtaatgtagttccttatcgattaggttggtcccatgacagtggaaaggttaactatactcattttctactctcttgctttaaatggagaggagtacaaacaactcttagtcaattattcataaccgacacgctgttttggttagacatcataaaaaaaatacaatgtaactggaccaagaaacaaactgagcaatttattcattccatacaaaaagaaatgcctgcaaaaacacttccagaagatattagcccatactcaaaacagatcttattcccatataaaaatgactatctaactttaactcctgttacttctaactcaattcaaacatggttagaacaccaatctaggaaacctaatgatattcgctggattaaacgagaaagtaagcaccctgctagtgtaggcgctttatcatcttctatcggtggataccatagcttactatcttcgctaccaagcacatcacaatcaccacactcgtatcacgataatatgactagcaaaactgaatgtagagaggctttttgtgcttcagctatcactgagaaaagtacgactgacgcattacaaaggctcatcagttctgaagtaagaatgaatgtgaaacatagaaaacaaatcagaaaatcagggattcatttcattagacaaaaaatagctctttggcttactcctctgattcgatggagagatcatatagataataaccagatacaaatcactaatgaccatccatcattagttaacctattcttgtcgtctcctattgctaattttcccgatttattaacaccattgcataatcacctaaatcaaactctaggaaataataaatacacaaaacgctttgcttatcaccctgatttaatgcctattttcaaatcacaaatttcatggattctgaataaactaacacaagatgaaaatataaatcagcagcccgttttaactagaacccaatttatccatcttaaaaatttaaggctatacaatggcaatgcgttaagctccccctatgtttgtggactaccttcactaactggtttttgggggtttatgcatgacttcgagcgaagattaaaaacaaagattgaagaaaacattcattttgaggctttcagcctatttgttcatcaatatgaattacaatcatctcctccgctctgtgaggcttcggatgtttataaaaaaagagaactatcacctgcaaaacgtttattaacgcaaccttcttattcttgtgatatgcgttttgacctcattatcaaagttcacactgaggttaatttaagcgatattagtcaacgtatgcaatctgcaatgcctgctcgttgtgttggtggtacgttacatcaaccttcgttacatgagagcttagaatggcttagaacctatacatcgtctgagcatttatttgaagaattagcttgccttcctaactctggtcgctggatatacccaccatcggaaacatttaacactccagatgaatttctttctatattgggaaatagcacacaccttgctatttgtaatggttattcatttcttgaagatcctacatatagagagaatgtgagccttaatcaacacgtattttgtgaacctttaattggattagcagagcaagtaatacctatagatatgagacttaaccgacaaaaacattatttttcaaatgctttttggtcgatcaatagtgatttcaattctattcttatttcaaaagcatgagtaaggatacgctatgaagctttgtaataacctgaactacactcgatcattgtcaccgggaaaggctgttttttattatgaaagtaaagatggtcaaatgaatcctattaagtgtgagcaaactcatttaagagcgcctaaagctggattttcagaggcttttaatagcgattactcaactaaaaacactgctccacaagatctctcctttagtaaccctcaatttattgaagagtgttatgttcctgttggtattgatgaaatcaaaattcgattttcattacgtatagaagcaaattcattacaaccagataaatgctctgatattcaaattagagaaatattgcaagcattcgccactaaatataaagaaaatggcggctatcaagaacttggtgaacgatacgcaaaaaacttactttctggtacttggctatggcggaatgagcataatctaggtacaagtatttcaataaaaacaacaagtaaccaagaatttaatatcaataatgcctttaagctatcaagaaaaacctccgctaaagataaaaaaacaatatcaaagttaggaagtgaaatcgcaagtgcattatctgaccctgaccattattactttgccgatataacagcaacaatcaatgtggctttctgccaagaaatttatcctagccaagagtttttagacactaaagaaaaagggaagccaagcaaagtatatgcaaaaacgtcacttcaaactggtgaaaaaaccattgcttttcatgcacaaaagattggagctgcaattcaacttatcgacgattggtgggctgacgatgccgatattccattaagagtaaatgagtttggtgctgatcatcacaatgtcatagccagaaggcacccctcacatcgtaatgacttttataccttaattcaaaacgctgataactactgcgcgcaactgaatgaaaattcagatattactgatgatatgcattacgttatggctgtattagtaaaaggaggactgtttcaaaaaagtgcttcttcaaaaaaaggaaagtagatgctcactcactattttagtattacgtatgtgcctgatgattgtgataatgagttattggcaggacgttgcatcgctgaatttcacaagtttatctctagtctaaggctgatagaaaacaactcttttgccattggcttcccaaattggtctgaacaaagtattgggaatgaatttgctattttttctgataactctgaattattaagtgccattaagtaccagccctatttcaatttaatgaagagtgaggaattattttctattacagacatcaagcctgtgccaaataatcttcctcaaataagattcatcagaaaccagtctattgggaaaatatttataggttcaaaaaaacgtagaatccagcgttcaatcacaagaaataataaagagcatacacctatatcaaatgaggacagagagtttgataccttccacaaagtgtcgtgctctagtaaaagtaaacagcaacaatttatccttcatattcaaaaagacatcaccccgagaactacagactctaacgatagctacaatagttatggcttagcgacaaatagtaaacatttaggcactgttcctgatttatcaaaaatacctttttattgcgaggacaaattatcaaataaagatcaatgacctttaataaggagatatagcatgtacgttcgtacactaaaacaatctcaagtaaaaaacattagcaaatttatgagcctgaagaatgattcgatcattcgtacagaatctatgcttgaatttgatatgtgctttcatcttgaatattctcctgatgttgttagctttgaatctcaacctcaaggctttcattacgaatatcaaggaaaacgcctcccctatactccagattttctcattacacattcatctggacagcaacaattactcgaggttaaacctctttctaaaacccaatgtcctgattttcaatcaaaattcatccaaaaacagcaagcagcccagaaattaaatctttcattaatccttattaccgaaaagcaaattagaacaggtcatttactcaacaacttcaaacttctgcatagatatgctggcctacatagtatatcggccactcaaaaatcaatcattaacctcatccagacagtaaataaaattcaaattaatcaaattgcacacaggttaaatatcagtaatggagaggtattagctggtgttttaagttggctatcaaaagggacactgcaaacggtttacacaaatgaaatgattaatggcaactctattgtatcgttaggtttatcaatggatatagaatttccatttactgatgaatttcaaaaaatattaactactcaatcctatccagctgaaatcactaatgataaaaaaacagaagtgcttacgccttctcttgattcatacgatgacgctataaaagcagaagtattgcgtcgtatttcttttcttaggtggataaagcctcgtttaaaaggtggatggacagaaaaaaatttaacacctcttcttaacgatgctgaaattgatttaaaagtgagcgcaccaaaatggcgaacccttgctgaatggcataagaattatcacaaaagtggggaaaaggtatcctctttaattccaaagcactcacataaaggtaataaaaatatgaatactgatagcgattttttgataacaaaagcaattaacgaaaaatatttaacactaaaccgatgctctatcagtcaaacttttaagtactattgtgatttagtaataattgaaaatcgctctatacctacaaagaaaataaaactggtcagtcaacgtactttttataaccgaatcaatgcactacctaaatatgatgtcgctttaaagcgttacggaaaacgatatgctgatattaattaccgcaccgtagataaaatgataacagcaacaaggcctttagaacgagtagaaatagaccacacgcctcttgacttaatcttgctcgatgacactttagagataccattaggtcgcccatacttaacaattttaatagatagctatagtaaatgcatcgtgggctacaatcttagcttcaggcctcctagctttgaatctattcgccatgctttttgtaatgcatgccttgataaatctttaattacacagcaatatcctcaccttcaacacgattggcctgttgcaggaaaaattgaaaatcttgttgttgataatggcgctgagttctggagtaatagcttagaagatagtttactgccttttgctaccaatattttatataacaaggttggtgaaccgtggatgaaacctcttgttgaaaagttttttgacctgttaaataaaggcttagtccattccctcccaggaacaactcgctcaagaatagagcaactgaaaggttataatcctaaaaaagatgcagcgattacattcagtttatttttagaactatttcatacgtggattatcgacatctatcacatgacttccgatacaagagagactgctgttccttattttaaatggcaagaaggagtaacggctttaccccctctcacctatacagatgaagaggctcaacaattacgaatagagcttggaatattaaatactcgaacggttcgtcttggaggtatttttcttcatggattacgttatgaatcagaagagttaagtgaatacagaaaaatttggggggctattgataagaataacctaacgctgaaaacaaaaaccgacccttcagatatatcacatatttttgtctatttaactaatgaatcacgctatattaaagttccttgcataacagatattagttatacatccggacttacgttatttcagcatcaaaccgctcaaaaattgcaaagaactaaaacaagattacaaatagatcatgaaaaactcgctgattcacgtatgtatgttgaaaatagaattgcggaagaagtggagaaaatcaaatctaataaaaaacgtactgcgaaaactacccatgcatcaaagatcgctcgacaccaagatattggtagtcatactcaaaagtcgattcaagtacctaatgagcaaagtgaaatcaaaaaactgaataaaaatgaacatgatgttttaaatggatgggatgaacaacatgatgatttagagggattctgatgcacactttatcttcgactcaaaaagagcaactcatcagctttaatcaatgctttattgagtatccaataattactcatatctactctatttttaatgatttacgaatgaatcaaggtttaggtgcagaaccacaatgtatgctcttacttggtgatactggctcaggaaaatcagcactcattaataactatctgttacgacaaccgccatcaaatttttccgcactcagttcattacccgttttacatacacgtatcccacgtagagtgaataacgaacaaaccatgtatcaactgttaactgacttaggacaatcaccttcaggatcgagacgtgcaaaacgctcagaaatcgctctcgccgaaggagtcgttcgagctttaaagcgtaaaaaaacagaactcattattattaatgagttccaagaactcatcgaattttcaagtgctaaagaacgtcagaatgtcgctaacacgcttaaatacattagtgaagaagctagagtatctattgtgttagttggtatgccctatgcagatattattgctgaggagcctcaatggggatctcgcttaacatggaaaacacaaatcgaatatttttcattaaaaaatgacatgaaaacctatgttcaattcctaaaaggcctagcaaatcgaatgggatatgatgaggtgccatcattgcatagcaaggagcttgctattccactgttttcaatttgtaggggtgagctaaggcaacttaaaaacttctgctctgatgcgatgctagagagctttaagcaaaacaaaaacacactaactcatgatgtattaagtgccactttcaagtacaaattcccaacgaagaaaaatccatttgaaatgaatgtagctgacgttccaattcaagaggtagagtcttattcaaagtataatctaaacgcaatgactgatgatgaacgtcttactgcaactaagtttcttgatgctatgtctttatcttcactgttgagtaagacttgacctaggctgctgccaccgctgagcaataactagcataaccccttggggcctctaaacgggtcttgaggggttttttgctgaaacctcaggcatttgagaagcacacggtcacactgcttccggtagtcaataaaccggtaaaccagcaatagacataagcggctatttaacgaccctgccctgaaccgacgaccgggtcatcgtggccggatcttgcggcccctcggcttgaacgaattgttagacattatttgccgactaccttggtgatctcgcctttcacgtagtggacaaattcttccaactgatctgcgcgcgaggccaagcgatcttcttcttgtccaagataagcctgtctagcttcaagtatgacgggctgatactgggccggcaggcgctccattgcccagtcggcagcgacatccttcggcgcgattttgccggttactgcgctgtaccaaatgcgggacaacgtaagcactacatttcgctcatcgccagcccagtcgggcggcgagttccatagcgttaaggtttcatttagcgcctcaaatagatcctgttcaggaaccggatcaaagagttcctccgccgctggacctaccaaggcaacgctatgttctcttgcttttgtcagcaagatagccagatcaatgtcgatcgtggctggctcgaagatacctgcaagaatgtcattgcgctgccattctccaaattgcagttcgcgcttagctggataacgccacggaatgatgtcgtcgtgcacaacaatggtgacttctacagcgcggagaatctcgctctctccaggggaagccgaagtttccaaaaggtcgttgatcaaagctcgccgcgttgtttcatcaagccttacggtcaccgtaaccagcaaatcaatatcactgtgtggcttcaggccgccatccactgcggagccgtacaaatgtacggccagcaacgtcggttcgagatggcgctcgatgacgccaactacctctgatagttgagtcgatacttcggcgatcaccgcttccctcatactcttcctttttcaatattattgaagcatttatcagggttattgtctcatgagcggatacatatttgaatgtatttagaaaaataaacaaatagctagctcactcggtcgctacgctccgggcgtgagactgcggcgggcgctgcggacacatacaaagttacccacagattccgtggataagcaggggactaacatgtgaggcaaaacagcagggccgcgccggtggcgtttttccataggctccgccctcctgccagagttcacataaacagacgcttttccggtgcatctgtgggagccgtgaggctcaaccatgaatctgacagtacgggcgaaacccgacaggacttaaagatccccaccgtttccggcgggtcgctccctcttgcgctctcctgttccgaccctgccgtttaccggatacctgttccgcctttctcccttacgggaagtgtggcgctttctcatagctcacacactggtatctcggctcggtgtaggtcgttcgctccaagctgggctgtaagcaagaactccccgttcagcccgactgctgcgccttatccggtaactgttcacttgagtccaacccggaaaagcacggtaaaacgccactggcagcagccattggtaactgggagttcgcagaggatttgtttagctaaacacgcggttgctcttgaagtgtgcgccaaagtccggctacactggaaggacagatttggttgctgtgctctgcgaaagccagttaccacggttaagcagttccccaactgacttaaccttcgatcaaaccacctccccaggtggttttttcgtttacagggcaaaagattacgcgcagaaaaaaaggatctcaagaagatcctttgatcttttctactgaaccgctctagatttcagtgcaatttatctcttcaaatgtagcacctgaagtcagccccatacgatataagttgtaattctcatgttagtcatgccccgcgcccaccggaaggagctgactgggttgaaggctctcaagggcatcggtcgagatcccggtgcctaatgagtgagctaacttacattaattgcgttgcgctcactgcccgctttccagtcgggaaacctgtcgtgccagctgcattaatgaatcggccaacgcgcggggagaggcggtttgcgtattgggcgccagggtggtttttcttttcaccagtgagacgggcaacagctgattgcccttcaccgcctggccctgagagagttgcagcaagcggtccacgctggtttgccccagcaggcgaaaatcctgtttgatggtggttaacggcgggatataacatgagctgtcttcggtatcgtcgtatcccactaccgagatgtccgcaccaacgcgcagcccggactcggtaatggcgcgcattgcgcccagcgccatctgatcgttggcaaccagcatcgcagtgggaacgatgccctcattcagcatttgcatggtttgttgaaaaccggacatggcactccagtcgccttcccgttccgctatcggctgaatttgattgcgagtgagatatttatgccagccagccagacgcagacgcgccgagacagaacttaatgggcccgctaacagcgcgatttgctggtgacccaatgcgaccagatgctccacgcccagtcgcgtaccgtcttcatgggagaaaataatactgttgatgggtgtctggtcagagacatcaagaaataacgccggaacattagtgcaggcagcttccacagcaatggcatcctggtcatccagcggatagttaatgatcagcccactgacgcgttgcgcgagaagattgtgcaccgccgctttacaggcttcgacgccgcttcgttctaccatcgacaccaccacgctggcacccagttgatcggcgcgagatttaatcgccgcgacaatttgcgacggcgcgtgcagggccagactggaggtggcaacgccaatcagcaacgactgtttgcccgccagttgttgtgccacgcggttgggaatgtaattcagctccgccatcgccgcttccactttttcccgcgttttcgcaga

SEQ ID NO: 1908 - DNA, 12057 bp, Synthetic construct
  source 1..12057: mol_type = other DNA
aacgtggctggcctggttcaccacgcgggaaacggtctgataagagacaccggcatactctgcgacatcgtataacgttactggtttcacattcaccaccctgaattgactctcttccgggcgctatcatgccataccgcgaaaggttttgcgccattcgatggtgtccgggatctcgacgctctcccttatgcgactcctgcattaggaaattaatacgactcactataggggaattgtgagcggataacaattcccctgtagaaataattttgtttaactttaataaggagatataccatgggtgctccgccgaataggcagctaaaaagagtacagcgcggctgaaatcatcattaaagcggtgctccgccgaataggcagctaaaaagtagcgaattccgagcgaaggagatatacatatgagatttacagttcaaaccgagctgtttaaggatgaatcgcttgaaagttatttgcttagattagcagttgataatacgtacattgattacagtgagttcgctgacgtcattggccgctggctggtcgatcatgatcatgaattagaaggtgcatttccctgttctttagacttggtcaatctttatcatgctaaagacagtagtatttttagagtacgagcattaaaactctttgaaacccttacgagctttaaaccttcaacgttattatctcaatctcttttacgcacgaactataaattcgctcaatatacggcattaaaatttggttccagcttaataccaagagtaatgcttcgagaaaacaaagcaccaattcctatttgcccacaatgcataaaagagtcagcttatataaggcaatgctggcacttaaaaccttataccttttgccacaagcataatctaaggcttctcaatgaatgccctaaatgcggcgacgaaatcaattatatacgctacgaagtaattgaaaagtgtatatgcggagctgacctgtcaaaaatggcagcagtacacggagatattaagtatcagaaatgcattaaaaatttatttaacgaaatagaaggcgacaaatcatcagaaataggtaagttgctttggttttcaaagtataaaaatattgagttagatgatactgaattactcaatgagttttatgattattttgagttctggcccgctacctatctaagcgaacttgagcaatttgaattaggtggaattaacaagcaaataagacctttcaaccagactccagtaaatgatatttggaaggaacaaatagcactgtcaaaattggcgtccccatttaaacagaacaatgaagtattgaaggtgctctcagagtattttgttgatcttgtttatcgttatcctaaatctgaaacactaaaccctgcggacacattgcttacaaagttagaagcatcaattttgttgagaacgcctctggagcaagtgaatcgactattgaacgagaactatttacatcgagctattaagccaaaaaaacacgaaataatagagccgttcaaaccgcttttgtatttaaggcaagtcattgagctaatggaagtaagaggaatcaatcaagcatattctaatttatatacaacaacttggtgaaagcgatgctgactataaatgagttgttagaaattgctgatattgaggagcgcaacaaagctatcaggagcagacttaggccttttcatgagccattaaatgttgacggttctgaaaaagaaatactcattgtgctgttaaatttgggttacagctcaaaagaacaagttgatttgctagagcagaagtcagcacaacaatttcttaagggcgaggagctttttggaaagacgatctctgaagctgaatggatacatacgcacaatttaaagtatcctgacatcagagtaagtaagcaaacaattcgagcgacccttcctgaagatgtagaaggcgtttgcagtaaagacatcctagaaagcatagagttaggttggtcccataatgcaacgtttgtcggtaaagtaacaccattaattacagagtttaaatggcaaggtaaagtgacctgtcttataaatttactgttaagtgagagtgccttctgggttaacttgctcataacgttaggtgtctcaaaaaggtgggtgaaccgaactaaaatacaacttgcagatataacggcaaattcttttcctgaagaagtagatcgttactctccacagttaagattctataatcaacgaggctatgtatcagtcacaccagttacaaaccataaactactatctgaaatacaaaagcgttgttttaataaagaatttcgatgtcgtaaggtcaaacatccaagggcaacatgcgcaggtcacttgataacatcattgggcggatacgtttcagtattggcttactatcccgacagaggctttaatcgaaatattaaccagtatattgacgacaagactgatagtaacttttttaattctaagtacctcaacaatcataacttcttagaggctttaggtgagctggttttttcaccgaaacgagaaacgttgaagctaactcgcattgctagggtagcagcaataaagtcaataaggcagacactgtattggtggttagctaaagctacagattacaaaaagcatgcgaatatatcatcggatgtttcttctaacgcaaagttattcaaaaggtatttgaatcaaggcgaatcaaagaatgaattagcgagtgagcttagtaacttaattcatgagcagttagcacaagctaatcaaacaaagcagtttgcatatcactctaagctaatatcaccaattaaacggcaactccaattcttactaaaaaatagagctaatagtgaaacagagcagcaagaacaaagagttttttatcttcatctaaaacgacttagggttgaagatctggaaaccctgagttgtccatatttatgggggatgccttcaataatagcttttgctggttttgcccataaatttgaacttaatttaaaaaagctgggttttcataatattcgagtaatgggggtcgcttgttttgttcatttatatcaagtaacagctaaaacatcattgcctgcatattcacatttaaagaaagaaaaacaaagtgatcaattaaggcctacacgacctgctttagtttcagcgccaaagagtcaaatgctatttgatttggtgttaaggctttggaatggaggtaatgagtacaatttagaaagtttacctaatcctgtacagataagggaagcattacccactcgctatgcaggtggaactattttcccaacaatccgtaagctagaggagcgatttacgacctcacataaccttacagagttatttaactctctaagttttatgccagcaaaaggttgttggctatacccatctcaattcaaagttcattcattagatgaactccataaggcattagatacagatttgaatctaagaccagtagctattggctatcagtatcttgaagaaccaaagtatagggatggtggcataagtgaactgcattgctatgcagaaaacttacttggcctgactcgatgcactaacagtgtggatgttagagttggtggtgctcaaaggtttttaagagaggcgttttgggctcaaaaaacaactgattctgaagtgcttatggttaaatcacgtttcgagtttaaattatgaaaatacctacacatctatcttacatgagatcattgtcgccatcgccagcgttattcttttataaaacagacgagtccgattttaatcctattgaagtctttagcgaaggaatcaatggcaggatgtcaggttccgcagttgcatataataaagatggtaagcttaaaaatgtaacggctaatgatcttggtcacgcaaatttacatgcgagtgaatattgttatgtacctccaaaaattaaggaattttactgtaagttttcattgaccattgctcccaatagtctttctccctatatatgcaatgatcaagatttagtaatgtatttggaaaagttagctcaatgttatgctgagaaaggcggttatcaagagttagcaaccagatatgcaaagaatattttaaatggattgtggctatggcggaacaaaaagtctcctaaagttgatatttctgtgtatgactttttgagtgaacaagaggttgctaatacagcgggtgttcaatcgctgtcttgggatggaaactgggggaaatatcacgatgagctacaaaaattatctaagataattgctcaggcacttcataataatgaagcatgcgaactggaagttgttgcaacaattcgcaatcgctttatgcaagaaatatatccaagtcagcttttacctgaagaaaacaaagtccacaagcaattagctacaacaagggttgaagatggctctgaaactacctgtttgggtcgttttaaagtgggagcagcaatacagataattgatgattggcatggtggagataagcctctaagggtgagtagttatggttctgtaccagaaaggttagtcgcattacgaactccttcaaacaaaaaagatgtttattcactcttacctaaaattatcgattacattaactttttagaatctaataacctcggtgaaaatgagacttcaaatgaaattaattatctaatggctatgttggtaaaaggtgatgtattaggcatgggatcggagaaaaaaagcaaatgagaagttatttttatatcacttatttgcctgaaaatgtgaacaatgaactgcttgcagctcgatgtgtcaatgtgctacatggttttgttgctaaagaagatgttgtcgatattggtattagttttccggcgtggagtgaacatacagtagggaatcaacttgcctttgtatcgacaagtaaaagtaagctgacaaggatacttcatcacaattatttctcaatgatgaaagaagatggtcttttttatatttctaacattgagccagtgccaacagggttaaaagagattcaatttttaagaaataatacaatcgcaaaaacaacgcttggtgaaaaacgacgcagaaataaaagagcgtttgaaagggctgaagctagaggagacgaatacgcgcctgttcaaaataatcaagctcaattcatccacaattatcatattctcaactgtacaagtggtagtaaaaatatgtcattccctctttatattcaaaagagggaagatacctctcaccaaaactgtgactttaatcactacggcctcgcttctaataagttatatagtggaactgtaccagagtttaactttgaccaataacctttaataaggagatatagcatgcctatatcgcgtcgaaatattagtcactcaagagttaaaaatctttctaagctctctaacttcaaaaatcctaacagtgaaaaacgaattgctgagtctcacaatgaatttttagctgctcattttctgaattattttcctattgttaagtctttccagttccagccattagcttttgattatgaaaatcaagatgaaatacattcatacactagtgattttctagtagaactcgagacaggaaaatttgtttatatagaagtaaaagaagagaaagcattatattcagaggactttaaatcaatttttgaagctaaaagagcagctgcaagacagttaaataaagaattaattcttattacagagaaccagtacaacatccctcctcgaatagacaatataaaatctcttttgaacgtgggaggtttttgggctgacgacaatatatctaacctagtggttggtatagtaaaaaaaagtgaaacgatcgatatagagggtattgcttatcatttaagtcaattttccagagaggaaatctttaaagcaatacgtatattgattctaaaacgagagatatattttgatttatctagttctgaactcacatttgattctaaagtatcaagcgatactacgcaatacaataatgcagagtttttcattgatgagttcgttgagtttgatttcaacaaaaagccggcaaaaaatgaggtgaaattatttccaaaagatatggatattttccctgaaaagtataaacaagaagctctagctaagaagcgctatattaaatgggttgaacgtaagctcgtaggaaagtggacagaaaagaatataaatttacttttacatgaaataccaaattttggggttaatcctacaccgtgttcgagaagtataatgcgctggaaagatgcgtacacgaaaggaagtcgaaaactaatagctcttgttcccaagcatgtgtctaaaggcaggactattgctgtcagtgaacatgacgagtttatcgaacatggaatcagtaactatctaactgaactaagattatcaattaatgaatgttataagaaatatgaaacacaactgcgaactaataccgacttagaacctgtcagttataatacttttaagttgcgcatagataaattgcctaagtacgatgttaaatgtgcgagagaagggaaagcagctgctgatatagactttaacaattatgacgaacattgcccacccaaaaggctttacgaacaagtagaaatagaccatacggtattgactgttattttgcttgattctgagtatttatttccgattggtaggccaaccttaaccgttttaattgataaattaagtcattgtatttgtggtttttatgttagctatgaacctccatcttacaatagtgctaggcaggcaattcttcacagtatcaagcctaaagattatattaaaaacttatatccttcgataaaaaacgagtggaactgtcacggaaaaattgaaaatttgatagtcgataacggtgccgaattttggagtaccaatttagaggttgcttgcgagaattggatgaacattcagtttaatcctgtagggaaaccttggaagaaggcatttgttgagaggtttattggaactacttgccgtgaatttactgcacggtttaaaggaaaaacattttctaatattttagagaaaatgaaatacgatcctaaaaaagatgctgtcatgaggtttgatttgtttcttgagctatttcataagtggattatcgatgattatcatcaaagagcagacagtagattcaaatacattccaaatgaactctggcagaaaaattatcttaaaagcccagttttaaagttagatcaagctgaggaagaaaaactggaaaatgacttcctttgtactgaatggcgtgagtggcgaaagggtggaatacatatatttaatcttcgttatgatagcgaatatctttcaaaggtgagaaaacagtacgttaaggaaggaaatgataaaaaacagaagattttagttaaatactctcctgaaaatattaatactattagaatttacattgaggacttaggtaaatacatcgaagtcccttgtgtggatagcgtaggttatacaaaaggtctatccctatttaatcatcaggtaaaccttagagttcatcgaacttacattaaatcgaaaattgatgtcgtgtcattagcagaagtaagaaaatatgttaatgatcgtgttgaagaagaagaggagtttgtagaaaagggtagaaagaagaacctttcggccaataaagcaagatcgaggtataaatcaataaacagtaaaaacagtataagtaaaaaagacaataaatttgaagatattgaaaaaagtgaagatgcttcacctgaagattggaataacttcgctgaaggtttggagggtttctaatggctagactttctacagagcaatgcgttttacttaaaaatttcaaaaatgaatttattccccatgctatagctgaaactattcatgacgattttgaacgtttgagagagaatcataggttaggcggcgaacagttgtgcatgttgatttatggcgacgaaggttccggaaaaaaatctattataaaggcttatgaagataaatgtaaaaatgaagaggttattgatgaagggaaatttaaagtacccgttttattttctgaagtgaaactgccaataactgtgaactcattctttacgcaacttcttatagatttaggtgagttcgctggggcatatagaaaagctgagggtaagaataagaataaggatatgagtaaacagctagaagatatattgaaagaacgccttataaaacttgaaactgaactcattataatttacaaatttgaactgttattgcaatttgataaaaaaatgaggatagatgagcttgcaaaccaattaaaaagcatggctcaagagcttggaatccctttggtgatcatcggaatgccatgtatcaaaaggttgatgttaacttcaggatggagaagctatattcatatttgtcggttaattccatatttcaaattaagtaatgaacttgaaaaggcattttacgttaaggttatcaaggggctttctaatagagcccaaaaactattttcttttgcaccaaaattagaggataaaagcatttcttatcctctatttgctgtttcgtcaggatgttttagaacaattagaaactatactaataaagctgtattactagcagtaaatgaaggtgctgaagaattgacaatagagcatttttctaaagttttcgagagggataatgagtacccgttattaggaaaggttgattcaacgaatgatgattccatgaaaaagttgaatgaaagtattaaagatgaaagggacaaaagagattctattaacccttttaaaatatctgtagataaactaatggtcaatgaggtgatagattatgcaacttataaatatgacgaagagtctgcttcagaagtaaaatttgacactaggtttgccgataaaatttcaataaatgatttattgagaaaataacctaggctgctgccaccgctgagcaataactagcataaccccttggggcctctaaacgggtcttgaggggttttttgctgaaacctcaggcatttgagaagcacacggtcacactgcttccggtagtcaataaaccggtaaaccagcaatagacataagcggctatttaacgaccctgccctgaaccgacgaccgggtcatcgtggccggatcttgcggcccctcggcttgaacgaattgttagacattatttgccgactaccttggtgatctcgcctttcacgtagtggacaaattcttccaactgatctgcgcgcgaggccaagcgatcttcttcttgtccaagataagcctgtctagcttcaagtatgacgggctgatactgggccggcaggcgctccattgcccagtcggcagcgacatccttcggcgcgattttgccggttactgcgctgtaccaaatgcgggacaacgtaagcactacatttcgctcatcgccagcccagtcgggcggcgagttccatagcgttaaggtttcatttagcgcctcaaatagatcctgttcaggaaccggatcaaagagttcctccgccgctggacctaccaaggcaacgctatgttctcttgcttttgtcagcaagatagccagatcaatgtcgatcgtggctggctcgaagatacctgcaagaatgtcattgcgctgccattctccaaattgcagttcgcgcttagctggataacgccacggaatgatgtcgtcgtgcacaacaatggtgacttctacagcgcggagaatctcgctctctccaggggaagccgaagtttccaaaaggtcgttgatcaaagctcgccgcgttgtttcatcaagccttacggtcaccgtaaccagcaaatcaatatcactgtgtggcttcaggccgccatccactgcggagccgtacaaatgtacggccagcaacgtcggttcgagatggcgctcgatgacgccaactacctctgatagttgagtcgatacttcggcgatcaccgcttccctcatactcttcctttttcaatattattgaagcatttatcagggttattgtctcatgagcggatacatatttgaatgtatttagaaaaataaacaaatagctagctcactcggtcgctacgctccgggcgtgagactgcggcgggcgctgcggacacatacaaagttacccacagattccgtggataagcaggggactaacatgtgaggcaaaacagcagggccgcgccggtggcgtttttccataggctccgccctcctgccagagttcacataaacagacgcttttccggtgcatctgtgggagccgtgaggctcaaccatgaatctgacagtacgggcgaaacccgacaggacttaaagatccccaccgtttccggcgggtcgctccctcttgcgctctcctgttccgaccctgccgtttaccggatacctgttccgcctttctcccttacgggaagtgtggcgctttctcatagctcacacactggtatctcggctcggtgtaggtcgttcgctccaagctgggctgtaagcaagaactccccgttcagcccgactgctgcgccttatccggtaactgttcacttgagtccaacccggaaaagcacggtaaaacgccactggcagcagccattggtaactgggagttcgcagaggatttgtttagctaaacacgcggttgctcttgaagtgtgcgccaaagtccggctacactggaaggacagatttggttgctgtgctctgcgaaagccagttaccacggttaagcagttccccaactgacttaaccttcgatcaaaccacctccccaggtggttttttcgtttacagggcaaaagattacgcgcagaaaaaaaggatctcaagaagatcctttgatcttttctactgaaccgctctagatttcagtgcaatttatctcttcaaatgtagcacctgaagtcagccccatacgatataagttgtaattctcatgttagtcatgccccgcgcccaccggaaggagctgactgggttgaaggctctcaagggcatcggtcgagatcccggtgcctaatgagtgagctaacttacattaattgcgttgcgctcactgcccgctttccagtcgggaaacctgtcgtgccagctgcattaatgaatcggccaacgcgcggggagaggcggtttgcgtattgggcgccagggtggtttttcttttcaccagtgagacgggcaacagctgattgcccttcaccgcctggccctgagagagttgcagcaagcggtccacgctggtttgccccagcaggcgaaaatcctgtttgatggtggttaacggcgggatataacatgagctgtcttcggtatcgtcgtatcccactaccgagatgtccgcaccaacgcgcagcccggactcggtaatggcgcgcattgcgcccagcgccatctgatcgttggcaaccagcatcgcagtgggaacgatgccctcattcagcatttgcatggtttgttgaaaaccggacatggcactccagtcgccttcccgttccgctatcggctgaatttgattgcgagtgagatatttatgccagccagccagacgcagacgcgccgagacagaacttaatgggcccgctaacagcgcgatttgctggtgacccaatgcgaccagatgctccacgcccagtcgcgtaccgtcttcatgggagaaaataatactgttgatgggtgtctggtcagagacatcaagaaataacgccggaacattagtgcaggcagcttccacagcaatggcatcctggtcatccagcggatagttaatgatcagcccactgacgcgttgcgcgagaagattgtgcaccgccgctttacaggcttcgacgccgcttcgttctaccatcgacaccaccacgctggcacccagttgatcggcgcgagatttaatcgccgcgacaatttgcgacggcgcgtgcagggccagactggaggtggcaacgccaatcagcaacgactgtttgcccgccagttgttgtgccacgcggttgggaatgtaattcagctccgccatcgccgcttccactttttcccgcgttttcgcaga

SEQ ID NO: 1909 - DNA, 624 bp, Vibrio diazotrophicus
  source 1..624: mol_type = genomic DNA
atgtacgttcgcaatcttcgaaaaccttcagcaaacaaaaacgtttataagtttgttagtgtaaaaaatggctgcaatatcatgtgcgaaagctcattggaatatgattgttgctactatttagaatattcggatgatgttgttcgttaccagtcacagccgaaaggttaccgttttccttatcaaggtaaagaacatccatacacccctgattttttagtccataagaaagatggaacgtcttatctcctcgaagtaaaaccactatcaaaaacattcagctccgaattccaagatgtatttcgccaaaaacaaatcatggcaagtgaattgggggcacctctattactcgtgacagaccgccaaattcggaacgatgtgcaccttaataatttaaaactcgtacatcgttatagcggttgtatcggaaattctagccatttggaaagtgtttggtcagccgttaatcaatcctcatcgatttgtattaaggcgttatctgcaattttgaatctaaccattggtgaagtttttgcttccgtactacgtcttattggtttaggaaaagccaaaacaaaattggatgttttactggatgaaaattctttaatttcggtggcttaa

SEQ ID NO: 1910 - DNA, 1908 bp, Vibrio diazotrophicus
  source 1..1908: mol_type = genomic DNA
atgtcttttgggccatttgaagatgagttcggttcaataacaaatgacgttcagcaacaatatgaggcaagccctgaagctaagctatctcggctgaagtattcacctcttgaaaccaccaaggttattgagcgagatctatcttcttttcctgaagagcaaaaactaaaagcgctggaacgttataaattaatctctttgattgctaaggagataaatggtggctggacacctaaaaatcttatcccattgatagataagcatatagaaacacttaatataccgaagcccagtgatcgtacagtaaaacgttggtataaagctttttgtgaaagcgatggtgatattaagagtttggttgatagtcatcacttaaagggtaaccggcagcccagaattgaagacgatgaaccgttttttatagaggctgttgaacgttttttagatgctgttcgtccttcttactctaaggcttatcaggtttactgtgaccgaattgaaattgaaaatagcactatcgtttcaggtaagatagcgaaagtcagctatgaagctttcaagaaacggctcaaaaaactccctccatataccgtcgctctcaagcgtcatggtaaatattacgccgacaaactgtttaactactatgaagcagtcaagatgcctacgcgtatcctggaaagagtagagattgaccatactcctctagatttaatcttgctcgatgatgagctgcttgtgccgttggggagagcctatttaactttattagttgatgtgtttagtggctgtataattggatttcatctcggtttcaaagcaccaagttatactgcggtttcaaaggcaattatccattcagttaaatcaaaggaatacgttaatgaattgccaattggattgtcgaaccaatggatttgtcatggaaaaatagaaaatcttgttgttgataacggtgctgagttttggtcgaaaagtttagaccaagcatgtattgaggctggtatcaacataatctataacaaagttcgtaagccttggttaaagccctttgttgagagaaaatttggtgaactaattcaaggtattgtgggatgggttcctggcagaacattttccaatgttcttgagaaagaagattatgaccctcaaaaagatgctgtgatgcgttttagtgttttcgttgaagagttacatcgctggattattgatgtgcataacgcttcagcggatagtcgacatacgcggatacctaattatcattggcaaaagagtgaagaagtattgccacctcctgctttgactgagcgtgacgagatacaattccgtgtaattatggggatggttcataaaggggcattaaccagtaaagggataaaatttaagcacttaatgtacgacaatgtggcgttagaacactatcgtaaacagtatccgcaatccaaagatagcaggataaaaacggtcaagattgaccctgatgacttatctcgtatctttgtgtttcttgaagaaaaaaagggttatatagaagtcccttgtaagtatgacccacttggttacaccaaaaaacttagcctttgtgagcatttaagaacggtaaaagtacaccgtgattttataaaaggacaagttgattcattatcactagctaaagcacgtcaggctttgcatgagagaattaagcaggaacatgaaaacttacgtcagatgtcgttacctcatcgtgctaaaaaggctaaaaacggtaagaaaatggctgaactggctggtgttaacagcgatagccctaaatccataacaaccgattatccgatagaagacaccatacaacttcacgaatctacacctgtcgatgatctccaatcactttggaataagcgcagggcattaaggaagtcgggcaaatga

SEQ ID NO: 1911 - DNA, 987 bp, Vibrio diazotrophicus
  source 1..987: mol_type = genomic DNA
atgacatcgcttcagccaacgaataatgacgtcgatgtattactagctgagttccatcagtcattcgtcgtttatccggatgttgaaaaggtttttgaaggtttagattggattgttcgtcgcagccagttcggtaagtttgcgccttctatgctaattacaggcgggacaggtgcgggaaagacttcagtggttgaaatctatttgaacaaccatttttcctcttcagaagtgttaatcacaagagtcaggccaagttttgttgaaacattaatttgggcgatcgaaaagctgaatgttccttacaacagtcggtcgaaacggtctgagattggcctacaagattatttcatcaatagtgttaagaaatctaagcttaagctgttggttatagaagaagctcaagaattgtttgagtgcgcatctcctaaagaaaggcaaaaaatacgtgaccgattaaagatgatcagtgatgaatgtcgattacctatcgtctttattggtattcctaccgccaaacttatcttggaagattcacaatgggacagacgaattatggtgaagcgagacttgccatatatccgaataacgaacgaagagtctttagatgtctatattgccttacttgaggggcttgaaaagaccttacctatttcagtcgctccggaactgactgatatggacatggctatgcgtttattagctgccagtagagggatgctcggtttaatcaaagaacttgtaggttatgcgtttgaactggctttactcgaaggtaaacgtcagattactcaaaacgaatttgttcaggcatttaaatctatttttggtcccgatattagtaacccatttgagattgaactggataaattactaatcccgcagattattgagtatgaaggctatcttttggactcagatagtggggatatcaagtttactcatcagatatttgaagacataccattaacagaattactacgttaa

SEQ ID NO: 1912 - DNA, 1212 bp, Vibrio diazotrophicus
  source 1..1212: mol_type = genomic DNA
atggatacggacatcgaagtttactctgatgaatctctcgaaagctttttactacgcttaagtaagtttcaaggctacgagcggtttgctcatttcgctgaagacatttggcaaactacgttattgcaacatgaggctattcccggcgcatttcctttcgagttaagtcgaatcaacatctataaagctcaaacaacgagccaaatgcgagttcgagtacttatagatttggaaaagcggctgaaatttaacgactttggcgttctacggctatcgcttgctcattcgaaagcaagtttctctccagattataaagcggtaaatcgctatggtgctgattatcctcaagcctttcttagaaaaaacttcacacctgtttgccctaaatgcctagacgaagctgcttatattcgtcagttgtggcatttcattccctaccaagtttgccataaacaccacagccaactcgctcaacgatgccccgaatgcggaaaattattgaactaccaatcgtcagagctaatagagaattgtgaatgtggtttttccttacttaatggcgaatcagagaaggaaagctgttctactttatttgttgcacagtggctagcaggggagaaacccgtagaatcaggattaatgagtcaggaactcactcaatcaagtcggtttggatttctgctttggtatatcaaccgatatggtgaacttgatgatattagttttgatggctttgttgagtgttgtaaatcttggccgaacaagctcaataccgatttagattcaattgtgcagaaggctgacatagtgcgaatccagccttggaacaaaatctacttcagtgaagtgtttggtgacttgttgaaagagtgtcgcagcctaccaagccgtgatcttagtaaaaatccggtgctgaaaaatgtagttctatatttcagagctttaatcaccaataatcctaaagtgaaatcagcaaacataggtgatgtattattaagccctttagaagcttctacattgctttcatgtaccacagacgaaatatatcgcctgtaccagtttggacagcttaaagctcaacacacgcccaagttgcagagtaaaatagaaaaccatcactctgttttcactcttcgtagcattatcgagctcaagttatccagtatgtgtagtgaaactgatggtttaaatcattatttgccagagtggtaa

SEQ ID NO: 1913 - DNA, 2091 bp, Vibrio diazotrophicus
  source 1..2091: mol_type = genomic DNA
atgacaactttgcaagatttaatcgatattgaagactctaagctccgatttatagagataaaaaaagcgtttatgccgtatacacgaccagtagaagttgatgggagtgaaaaacaggcattaattgttttactcaatctttcattgagtaaaccggaagtgaaagactggctcgattttcctcgcgctttggactatttcgccgattcagataacttatcggcggctgaacaagaaattcagtggtttcatacccataacctcaaattcccagattgccgagtatcagagcagcgaatcatagctacacctctgtacactgagactccgacactcacgagtcagtcattaaacagagcttatggctgggcgcacaattccgctgtttataaacatactatctggttattaaatgaattccggtggcgtggaagagtggaaaatctgcttaatcttatttgtggtggtgatgatttttggctggaacttttagctgatatgggattaaaacctaaagcacaaatacagcttaaagatctaattgaacatcagttaccgttgactcattttcccgacgaagtgaaccgctacagcaagcagctccgtttcccttggaggggggattacctatcagtaacccctgtggttagccatgctatacagcagcaactctctgttttgtctcgtcaaggtgaatgttctcttcgctttaaaacaatgacctatccaaattcagctagtattggaaatttatgtggttcactgggaggatatataaatgtactcaattatccgattgacgtaattgcgaatcgacatcaaacactcggtgcaagccgcagtagaaccaagcgctactttgatgattttcagttaacgtcaaaaagtacctgtagtgtattggctcatctgacaggttttgaacaacctcaaatgcgcaaagcgcagaaacatgttcgccagtatcaactgaaaattatacgtaaacaaatcgctttatggttactcccgcttattgaattacgggataattcagtcactgatccaattggcttttatgatgaaccagatgatgaactggcgaagcgattcttgaccatcaatgagcttgattttatagagctcacaaccagcttaaatcagcgcttgaatatagctttacagaacaaccgctttgcttctcgttttgcctaccatcccaaactgatgcgtgtgttaaaaacagagcttatttgggtgctaactcagctaagtcaacctgaaccagaacctcctactgtttctgatagtaaagtgcagtatctttacctttcatctatgagagtatttgatgctgctgcaatgagttgcccgtacttatctggtgcgccttcattaacggcggtgtggggatttgttcatcgttaccagagagagctacaagatttgctatctgatggagaagggcaattcgagtttaaagattttgctttttttattcgtgatgaatccgtacaaaccagcgcaaagctcaccgaacccagtgtaatagcaaaagctcggagtatttcacaagttaagcgaaccacgatcattcgtgaagattgctcggatttaatattcgatattgtaattgcaatagaaagtgaccaacgaatttcagattaccaaagccagtttaaagctgcattaccaactaatttcgctggaggggccttgtttcaacccgagattaattcagggattaattggttaagaacctttgtaagtaagtcagaattgttccaagcggtgaaaggtttaccgggctatggtacttggttgtcaccagattcttttcaacctcaaaatctggctgagttacaagagtgtttaacgattgatagttcgctaattcctgtatcaaatggctttcattttctagggtcgccacaggaacggaagggggcattgacgaaactgcattgttatgcggaaaacaacattgctttagctaaacgaaccaatccaatagaagtaagatttgccggtagtgatcacttttttgagcaggtgttttggtcgctggaagtgacagagcagactatccttataaaaaacaaaaggatttag

SEQ ID NO: 1914 - DNA, 1038 bp, Vibrio diazotrophicus
  source 1..1038: mol_type = genomic DNA
atggaactctgcagtcagttaaattatgttcgctcgttatcacctggcagagcatatttttattatcttgatgaagataataagatgcgtccacttcagatagacaggactcatttacgagcacccaaaagtggctattcagaagctttctcgggtaatttcaaatctaaaaatatagctccgcaagatctttcctattcaaacccacaattcattgaagagtgttacgtgccgcccggagtaaatgatatctattgtgctttctcgttaagagttcgagcgaattcattatcaccagaagtatgtgttgataatgaggttcgagacatactctgtaattttgcggcactgtataaagaattaggaggatatcgggagctggcaaggcgttatgccaaaaatattttgatgggtacgtgggtttggcgtaaccgagagtgcagaaatataagggttgaagttaaaacagaagataaagagtgggtaattactgacgcaaggtttttagattggtatggctcgtgggagaaggattcacaattagccttagatgaatttactgactatttgtctcaagctttgtcggatagaacctgctatttcaatatggatattaaagcgaagctcactgtaggttggggcgatgaggtttacccaagccaagaattcttagatgtgaaagaagcaggaaagccaagcaaactgttggcaaaggtaaccgtcaatggcgaagagtcagcagcctttcattcgcagaaagttggagcggcgattcaacgaatcgatgactggtgggatgaaaatgccgataagccgcttcgcgttaatgaatatggagcagacaaagaatatgcaatagcaaggcgacatagttcacgacaccgggacttctactcattgattgcacacactgaaagctatgttgaattgatgctagaaacgaatctgatctcagatgatgtccactttatcatggcagtactaactaaaggtggagtgttcagcggtgcaagcaagaaaagcaagaaggatgagtaa

SEQ ID NO: 1915 - DNA, 612 bp, Vibrio diazotrophicus
  source 1..612: mol_type = genomic DNA
atggaatctcgctattatttttctattcgatatattcctgaacatgttgacaatgaactattggcaggtcggtgtatttcgaatatgcatgggtttctttctcacgaacgcaacacgcaattcaaaaatagtgtgggtatttgtttccccctttggaatgaacaaacggtcggtaatgtgattacttttgtctcgactaatgaaagtatcctcactggcctatcataccaaccttacttctctacaatgatgaacgagaacctctttgaaatctcaggtattaggattgttcctgatgacgctaaggacgttcgatttgtattcaataaaacaattcaaaagatattcaatggttcgaaaaagcgaagaattaaacgagcgatgaaacgtgctgaagaatttggtcatactttcacacctatatcagttgaagtacgggagtttgagttgttccacgagattcctataaacagcaaatcatcaggacgtgatttcgttctacatatacaacgccaaaatccagtggaagcggaaataggacagggatttaatggctatggttttgcatcaaatcagctatggcgaagaacagtcccacttatcttgttttga

SEQ ID NO: 1916 - DNA, 28 bp, Vibrio diazotrophicus
  source 1..28: mol_type = genomic DNA
gtgttccgccgaataggcggctaagaaa

SEQ ID NO: 1917 - DNA, 510 bp, Vibrio diazotrophicus
  source 1..510: mol_type = genomic DNA
tgtcgctgaaaccataagatgtcctaacgctccattacaaatcaatccattaccaacacagtaaaaccatatagtgtcctaagatgaaagcataacgtgtcctattttctgcttcggtttaacactgaggaaaattgtgaaagaaaactacttactgttttatgcagaagtgcagtagagaaaaccacacctcttggtgatcacacggctaactatcacagcgactaaccatgccaatgtaacaaggtttnnnnnnnnnncatcatccgaatattctaaatagtagcaacaatcatattccaatgagctttcgcacatgatattgcagccattttttacactaacaaacttataaacgtttttgtttgctgaaggttttcgaagattgcgaacgtacataacatgtcctttttcgttgtaaaaaaacaaccaaaataagtttaggacactttatgggttttattgggacattttatggtttttttgggacgctttatgatttcagcgaca

SEQ ID NO: 1918 - protein, 207 aa, Vibrio diazotrophicus
MYVRNLRKPSANKNVYKFVSVKNGCNIMCESSLEYDCCYYLEYSDDVVRYQSQPKGYRFPYQGKEHPYTPDFLVHKKDGTSYLLEVKPLSKTFSSEFQDVFRQKQIMASELGAPLLLVTDRQIRNDVHLNNLKLVHRYSGCIGNSSHLESVWSAVNQSSSICIKALSAILNLTIGEVFASVLRLIGLGKAKTKLDVLLDENSLISVA

SEQ ID NO: 1919 - protein, 635 aa, Vibrio diazotrophicus
MSFGPFEDEFGSITNDVQQQYEASPEAKLSRLKYSPLETTKVIERDLSSFPEEQKLKALERYKLISLIAKEINGGWTPKNLIPLIDKHIETLNIPKPSDRTVKRWYKAFCESDGDIKSLVDSHHLKGNRQPRIEDDEPFFIEAVERFLDAVRPSYSKAYQVYCDRIEIENSTIVSGKIAKVSYEAFKKRLKKLPPYTVALKRHGKYYADKLFNYYEAVKMPTRILERVEIDHTPLDLILLDDELLVPLGRAYLTLLVDVFSGCIIGFHLGFKAPSYTAVSKAIIHSVKSKEYVNELPIGLSNQWICHGKIENLVVDNGAEFWSKSLDQACIEAGINIIYNKVRKPWLKPFVERKFGELIQGIVGWVPGRTFSNVLEKEDYDPQKDAVMRFSVFVEELHRWIIDVHNASADSRHTRIPNYHWQKSEEVLPPPALTERDEIQFRVIMGMVHKGALTSKGIKFKHLMYDNVALEHYRKQYPQSKDSRIKTVKIDPDDLSRIFVFLEEKKGYIEVPCKYDPLGYTKKLSLCEHLRTVKVHRDFIKGQVDSLSLAKARQALHERIKQEHENLRQMSLPHRAKKAKNGKKMAELAGVNSDSPKSITTDYPIEDTIQLHESTPVDDLQSLWNKRRALRKSGK

SEQ ID NO: 1920 - protein, 328 aa, Vibrio diazotrophicus
MTSLQPTNNDVDVLLAEFHQSFVVYPDVEKVFEGLDWIVRRSQFGKFAPSMLITGGTGAGKTSVVEIYLNNHFSSSEVLITRVRPSFVETLIWAIEKLNVPYNSRSKRSEIGLQDYFINSVKKSKLKLLVIEEAQELFECASPKERQKIRDRLKMISDECRLPIVFIGIPTAKLILEDSQWDRRIMVKRDLPYIRITNEESLDVYIALLEGLEKTLPISVAPELTDMDMAMRLLAASRGMLGLIKELVGYAFELALLEGKRQITQNEFVQAFKSIFGPDISNPFEIELDKLLIPQIIEYEGYLLDSDSGDIKFTHQIFEDIPLTELLR

SEQ ID NO: 1921 - protein, 403 aa, Vibrio diazotrophicus
MDTDIEVYSDESLESFLLRLSKFQGYERFAHFAEDIWQTTLLQHEAIPGAFPFELSRINIYKAQTTSQMRVRVLIDLEKRLKFNDFGVLRLSLAHSKASFSPDYKAVNRYGADYPQAFLRKNFTPVCPKCLDEAAYIRQLWHFIPYQVCHKHHSQLAQRCPECGKLLNYQSSELIENCECGFSLLNGESEKESCSTLFVAQWLAGEKPVESGLMSQELTQSSRFGFLLWYINRYGELDDISFDGFVECCKSWPNKLNTDLDSIVQKADIVRIQPWNKIYFSEVFGDLLKECRSLPSRDLSKNPVLKNVVLYFRALITNNPKVKSANIGDVLLSPLEASTLLSCTTDEIYRLYQFGQLKAQHTPKLQSKIENHHSVFTLRSIIELKLSSMCSETDGLNHYLPEW

SEQ ID NO: 1922 - protein, 696 aa, Vibrio diazotrophicus
MTTLQDLIDIEDSKLRFIEIKKAFMPYTRPVEVDGSEKQALIVLLNLSLSKPEVKDWLDFPRALDYFADSDNLSAAEQEIQWFHTHNLKFPDCRVSEQRIIATPLYTETPTLTSQSLNRAYGWAHNSAVYKHTIWLLNEFRWRGRVENLLNLICGGDDFWLELLADMGLKPKAQIQLKDLIEHQLPLTHFPDEVNRYSKQLRFPWRGDYLSVTPVVSHAIQQQLSVLSRQGECSLRFKTMTYPNSASIGNLCGSLGGYINVLNYPIDVIANRHQTLGASRSRTKRYFDDFQLTSKSTCSVLAHLTGFEQPQMRKAQKHVRQYQLKIIRKQIALWLLPLIELRDNSVTDPIGFYDEPDDELAKRFLTINELDFIELTTSLNQRLNIALQNNRFASRFAYHPKLMRVLKTELIWVLTQLSQPEPEPPTVSDSKVQYLYLSSMRVFDAAAMSCPYLSGAPSLTAVWGFVHRYQRELQDLLSDGEGQFEFKDFAFFIRDESVQTSAKLTEPSVIAKARSISQVKRTTIIREDCSDLIFDIVIAIESDQRISDYQSQFKAALPTNFAGGALFQPEINSGINWLRTFVSKSELFQAVKGLPGYGTWLSPDSFQPQNLAELQECLTIDSSLIPVSNGFHFLGSPQERKGALTKLHCYAENNIALAKRTNPIEVRFAGSDHFFEQVFWSLEVTEQTILIKNKRI

SEQ ID NO: 1923 - protein, 345 aa, Vibrio diazotrophicus
MELCSQLNYVRSLSPGRAYFYYLDEDNKMRPLQIDRTHLRAPKSGYSEAFSGNFKSKNIAPQDLSYSNPQFIEECYVPPGVNDIYCAFSLRVRANSLSPEVCVDNEVRDILCNFAALYKELGGYRELARRYAKNILMGTWVWRNRECRNIRVEVKTEDKEWVITDARFLDWYGSWEKDSQLALDEFTDYLSQALSDRTCYFNMDIKAKLTVGWGDEVYPSQEFLDVKEAGKPSKLLAKVTVNGEESAAFHSQKVGAAIQRIDDWWDENADKPLRVNEYGADKEYAIARRHSSRHRDFYSLIAHTESYVELMLETNLISDDVHFIMAVLTKGGVFSGASKKSKKDE

SEQ ID NO: 1924 - protein, 203 aa, Vibrio diazotrophicus
MESRYYFSIRYIPEHVDNELLAGRCISNMHGFLSHERNTQFKNSVGICFPLWNEQTVGNVITFVSTNESILTGLSYQPYFSTMMNENLFEISGIRIVPDDAKDVRFVFNKTIQKIFNGSKKRRIKRAMKRAEEFGHTFTPISVEVREFELFHEIPINSKSSGRDFVLHIQRQNPVEAEIGQGFNGYGFASNQLWRRTVPLILF

SEQ ID NO: 1925 - DNA, 624 bp, Vibrio sp.
  source 1..624: mol_type = genomic DNA
atgttcgatcaaaccaagaagtcatctcacgtgcacaacatctgtaagttcatgagcttgaagaatgatgcagttgttcgcactctgtccattttagagtttgatttctgttttcacctcgaatacaacgcagacatcaaaacctttacgtcccaaccttttggtttccactatcaattcaataatcgaaagtgccgatatacgcccgattttttggcgacagatcacgatgaacattcaactttcttcgaagtaaaacactctagccagattctcaaacctgatttcagggaacgatttaaagagaaacaaagagttgcgttcaatgagtttaacagacgcttggttttagttactgagaagcaaattagaatgggaccaactttagataacttcaagctactacatcgttactccggattgcggaccgtgactgagtttcaaaagttagtgttggcgtttattcaacgtaaacaaatggtgaagttacaagaggtgtctttgtatttcggtttatcggagcaggacacacttatctctactctaccttggatctcttcggggcaagttaaaacaaacctcaataatattggctttggcctcgaaacttacgtttggtgttaa

SEQ ID NO: 1926 - DNA, 1866 bp, Vibrio sp.
  source 1..1866: mol_type = genomic DNA
atgccgtcggactccaataacatatttgggttctttgatgagtttgaagcttcagagggagagtcgcagcagcttccaatagagttaattcaagaacctattgaaatcttttccactattgatactcaatcaccaaaggtacagcaagaagttatccgccgtatcaaaatcatcgatttcgtagagaggcgcctaaaggggggatggaccgagaaaaacttgaatcctatcttaagtctcattgaaccagaattaaagcttactcccccgagttggcgaactttagcaacttggaaaaaatcttactttgaagcgggtaaagacccatgtgcacttattccgaagcatacgtttaagggcaaccgccaaaaagaaatggattcgcaatccttgattgatgaggcagttcagaacgtatacctgacacgtgaacgacttagcgtggcagaagcataccgatactataagagtcgagtgattcaaataaatcgcgggattgtcgaggggaaaatcaaaccaatttcagatcgttctttttataatcgaatacacgacttacctccatatgaggtcgcgatcgcaaggtttggcaaacgatatgcggatcgggagtttcggtcagttggtcaacaggtagccgcgactaaaccaatggagtttgtcgaaattgaccatactccagttccagtgattttgatcgatgatgagttagagattcctttaggtcggccctatctgacgatgctatatgaccgcttcagtaaatgtatcgtaggatgcagtatcaactttagagagcctagttttgactctgtcagaaaggcgctattgaattcgctactagataagagttgggtaaagcaaaggtatccttctattgataatgaatggccttgccacggcaagattgactgtttagttgtcgataatggtgctgagttttggagtaaaagcttggaagattcgttacggcctctggtatcagacatccaatacagtcaagccgctaaaccttggcgaaagtcagggatcgaaaagctgtttgatcagatgaacaaagggttagtgaacgcactgcctggaaaaacgttcaccaatcctactcagctacaagattacaacccaaagaaggatgcggtggttagagtttccgtgtttcttgagctacttcataaatggattgtcgattattaccatatggcacctgattcaagagaacgtgacattccataccacaagtggaaccaatcggaatggactccctcttactacagtggtgttgagaaggagcagttgagagttgagctaggtttgcttagacacagaaccattggagtagcagggatcaggcttcataatctccactatcagtcctcagaacttattgaataccgtaaatattgggcgtccaacaatggcaaaaagctgtttgttaagaccaaaacagacccttctgatatcagctctattcatgtttatctagaatcggaaaagaggtacataaaagttccagcggtagacaacaccggatatacaaaggggctgtcgctttttgaacacgagcgaatacaaaaagtacgccggctcaatactaagcagcttactgatgatgaggcgcttgcggatacattcctgtatatgaagaaacgtattcaggaagaaaccgatagattccgcggtgcaaaaagcaataaggctagcttgcctaaaacgggcaatacttcgaaattagcaaagtttaatgatgtcggatctgagggaccaagctcaatcaacgtgattcctgttacgcacaaatctgaggttgtttccgatgcctcagagtacttagatgacgatgattttgaagatattgaagggtattaa

SEQ ID NO: 1927 - DNA, 1116 bp, Vibrio sp.
  source 1..1116: mol_type = genomic DNA
atgacgatgattttgaagatattgaagggtattaatttgaatttaacgccaaagcagcttgagcagctaaagtcctttgaaaccagctttatcgagtatcccgcgataactgaaatctactctatctttgatcaacttcgtttcaatcactctttaggtggtgaaccagagtctttcttgttaactggtgaggctggaagtggaaagacggctttgatcaacaactacttatcacgctttcaatcgggttcaacttgggaaaaacagccagtgttaagcactagagtgccaagtcgtatcaatgaacagaatacgctgacccaatttttggttgatttagattgtaaatccggaggaagaggtattcggcgccgtaatgaaattgcgcttggcgaagcggttgtaaagcaacttaaacgtaaatctgttgagctgattattgttaatgaaattcaagagctggttgagttttcaaccgcagaacagagacaagttattgccaacacattcaaatatataagtgaagaagcaagagtctcgtttgtgctagtgggtatgccttatgctgatgtgatagcgacagaaccacagtggaactcgcggctaagctggaggagaaagatagattatttcaaattgttgaaagcgaagagtcattcgaatagaacggtatcttatgggtttgacttagaacaaaaaaaacattttgccagatttgtcgcgggtttgagtgcgagaatgggctttgatgaaccgccagtgcttacaaaaaatgaagtgttatatcctttgttcgttatgtgtagaggggagtgccgagcgttgaagcacttcttgaaagatgcactacttatgagtttcaatgagaacgtcgatacgataaacaaagcgatattgacgcgcacgttttcgtttaagtttccctatttggacaacccatttgactctcctgtagagcagcttcgtcttcatcaaattgacgctggctctacttacaacctaaatgccattacagcagaagataagattctcgcgcctcgttttacagatgcaattccgttgagcatgttattgagcaaaatacgcttaaagcttagagtggctttcgtgatttag

SEQ ID NO: 1928 - DNA, 1212 bp, Vibrio sp.
  source 1..1212: mol_type = genomic DNA
gtgaataccgaccttcaactataccctgacgagtcgctagagagcttcttgttacgcttatcgcaagaacaaggctacgagcgattttctcattttgctgaagacatctggtttgacacgatggatcagcatgaagcgatttctggtgctttccctttagagctcaatcgagtcaacatctaccacgctcaaacaacaagccaaatgcgagcgcgggttcttattcaccttgagaaccaattcaagctcaataactttggtgtactgcgtctcgcgctatcacattcgaaagctcaattctctccgcaatacaaagcggtacatagattcgggtctgactacccgtatgcttttcttcgcaaacgcttcacgccaatttgccctctgtgtattagcgaagctccctacattcgccagcagtggcaatatatctctcaccaagcttgtgaacatcatggctgtaaactggttcatcactgccctgagtgtatatcgagactagaatatcaaggtaccgagagcattagccagtgtgaatgtggttatgaactccgaaactcgccagtagaggacgcgtcagaggctgaggtattggtagctcgatggttatcaggaagcgattcaaaacccttgggattattgaaagcaggaatgactttatctgaacgctacggttttttaatttggtatgtaagtcgctatagtgacgtcgatgatattagctttgaagcctttattgactattgcttcgcatggccaacatcactcaaagaggacttagatgcattggtgctaaaagctgatgtagttcgagtgagagattggcgaaaggctttcttttcagaggcgtttggcagcttgcttaaagactgtcgtcatttgccgagccgcgagttgagtaaaaacttagtgttgaatgaagtgttgaggtatctctcagggcttgtttcggataacccagcctcatctaagggaaatgttggtgatgtgctgctaagcccgttagaagcctctacattgctttcttgcacaacagatgaagtatatcggctctatgagtttggtgaaatcaaagctgctattcggccgcgtatgcatactaaaatagccagccatgaatcggctttcacgctaagaagcgtggtagaaactaagctaactcgaatgagctcagaaatggatgggctatgcgtatatttgccggagtggtaa

SEQ ID NO: 1929 - DNA, 2088 bp, Vibrio sp.
  source 1..2088: mol_type = genomic DNA
atgacgaaacttattgagttgctctcaattgaagatgcgaataaaaagcaggcaatgttgaaaaaatggttcatgccttacaccgcagacattgaagtcgacgggcttgaggagacggcattaacggtactagttaacctaagctctcatcataaaggcgataaatgcaatgactggttagacaaagtccgtgcgaagcagcatttgagcgattcagaaaacatagactcatcaataggggaattgaaatggtttcactcgcacaatttgaaatatccagactgccgcgtagcagagcagaggctgattgctaaacctttgcaaaccgatgaagtgtttatttcgggaagaagtcttgaaccgagtttaggctgggcgcacaactcagcatattaccgacacgtattgtggttattgaatccttttcgttggcaatccaaatcaaccaatgttctcacgctagtgcgagaaggacaccacatttggttagcgttattgcaagactttgggttagaggtcaaaactctcgtcgctttgcaaaaggcgattaacgcacaagttccagattcaacctttccaacatcagtcagttcgtatagcaagcagttacgatttccatgggagaacgactatgtatccattaccccggttgtgaaccactcaatacagcgagagctcgaggttcgagctcgggataaggagagcaaactgagttttgttacctcatcactgcccaattccgcaagtattggaagcctttgcggaagccttggtgggaacatgaaaataatgaactatccacttggggtaaagtcgacactaaatgggacgttagcgacaaaccgcaataaaaccggtcgctactttgatgattatcaagttacaaatcatcaagtctgcttggtgctcagcaggttgactggcagtgaaccactcaaaactaacaagcaaagagataaagcacgcaatgtccaaagtaagatcttgagaaagcagatagcgctatggatgttgccattaattgaattgcgcgatcgagctaatttaaatccaagtgagcagtttttaaatagcctagattctttagcgagtgcatttttgacgttacccgagtcagagcttaaatcactcgcaacccaattcaatcaccgacttcactatgtgctgcaggaaaataaatttactcataagtttgcttatcaccccaaactattacaagtcattaagtgtcagatagtttgggtactgaatcaattgagtaagccgagcactagtgatgaaactactcaaagcgaacaatacatctatctgacttccatgcgagttcaggatgcggtggcgatgagtagtccatacttgagtggagcaccgtcacttaccgccctttggggctttatgcaccgttatcagagagagtttagtcagttaatcggtagcgactcatcattggaattctcaagcttttcttttttcgttcgaagtgaggatatacagtccacagccaaactgactgagccaaattcagtagcaactaaaagaacagtttctaatgctaaacgtcctacgattcgttctgagaggttagccgatttagaaatagatatggtgattcgagtcaagggtcacgagcgtttagcagaccacttcagcgagttaaaagcgtcgttaccaatggcttttgcgggaggatacttattccagcctccgatttcatctgaggttaactggctaaacatttttggcagccagtcagaagtgttccacgcgattaaaggagcaccaacatacgggcgttggttatacccaagcgagttgcagcccagtagctttgacgagcttgaattgcagatttcaagcgatgccgacattcatccagtttctctcggctatcatttgctggaaaaaccgacatttcgtgagaactcgataacagagtgtcatgcttatgcagagaacgcgataggggttgcaaaacgcgttaatccgattgaagttcgatttagtggtcgaggtcactattttgagcatgcgttttggtcgctagaatacagctacgcaactattcttatgaaaaactataggaattag

SEQ ID NO: 1930 - DNA, 1038 bp, Vibrio sp.
  source 1..1038: mol_type = genomic DNA
atggatttgtgtagccagctgaattatgttcgttcactttccccaggtaaggcgtatttttactacttatcaaaagatggtgagatgtgtcctgttggtattgatagaacaaggttgcgagcaccaaaagcaggctattccgaagcttacaaaggcaacaatttttttgcaaaaaatgttgctccccaagacttggcttacgctaatcctcaatacattgaagagtgttatgttactccaggggttgatgatatttattgtgcattttctcttcgtatccgtgctaattctttgttccctgaagtatgtaataacgatgatgtacgcaatgcgttagtgtccttgagttcggtatataaggagcttaatggttaccaagagctggcgcaccgttatgccaaaaatattctatcaggagcatggttgtggagaaataaagagtgtcgagcattatcaattgaagtcacgactagcgaagaagagagaataattgttaatgatgcactgagactatcttggtatggacactgggatgaagagtcaacactaagccttgagcttttgatggcttatctaagccgagcgctatcagaccgttctgaatctttctacatggatattcgagcgaagttatctgttggttggggagatgaggtttacccgagccaagagtttttagataccaaagaggatggtattccaaccaagcaattggcaaccgtgaaactgagtaatggcaaagaaacggtggcgtttcatggtcagaaagtgggtgctgcgctgcaatctatagatgactggtggcatgaagacccagataaagttttaagagtgaacgaatatggtgctgatcgagagtatgtgatcgcaagaaggcatgtggcattagaaaatgacttttatcacctaatcaaaaataccgagagttgggtgaaggaaatgaacaaaacaaaagtgattccaaatgatgttcatttcattatgtctgtcttggttaaaggcggtctctttaatggggcaagcggtaaggccaagtga

SEQ ID NO: 1931 - DNA, 603 bp, Vibrio sp.
  source 1..603: mol_type = genomic DNA
atgaacaaacgctatttcttctatatacgctatcttccggagcaggttgactgtggacttcttgctgggcgctgtattagccaaatgcacaagtttatggtcaataataaacaggctatgaatcaaataggagtgagttttccgtgttggtgtgcggattcagttggtaatagcatcgcctttatttctgaagataaagaccttttgatagggctaacatttcaaccttatttttctgtcatgaaggaagaagaactgtttgagttgtctgatgtacatcaagttccagaaggcgcaactgaattaagattcgtccggaatcagacgataggcaaaagctttataggctctaaaaagcgaagaatgaaacgcagcattgctagagcagaactaacggattcacaatcattacccgttgcagatgaagatcgcgaggttgaacatttccatcgaattccaatttctagtggttcatctaggcaggacttcatcttacatgttcaaaaagaacatgttggcgagagcgtccctacaaactttaatagttatgggttcgccaccaaccaagataaacgaggaaccgtacctgatattcacatttaa

SEQ ID NO: 1932 - DNA, 28 bp, Vibrio sp.
  source 1..28: mol_type = genomic DNA
gtgacctgccgcataggcagctaagaat

SEQ ID NO: 1933 - DNA, 510 bp, Vibrio sp.
  source 1..510: mol_type = genomic DNA
tgatgcttgcaagataagtcttcataacgcgaaccaactatcaacgtgttaaaatactatttgcagcataagttcgcataatattgcgccaaaactctgcaaattttagcaactacccaaatccaacgttgtaaaattaccacctcctgtgagccctctgaaatggatggtgatcacattggatggggagtatgtatgaaacacacttttggacacaaaagcgttagagttggcgctctatggcatacgcnnnnnnnnnnttgatgtctgcgttgtattcgaggtgaaaacagaaatcaaactctaaaatggacagagtgcgaacaactgcatcattcttcaagctcatgaacttacagatgttgtgcacgtgagatgacttcttggtttgatcgaacatagcacaatcacttttgttgtaaacctacaacaaaaaaatagactatgaaaacttatggtgcaaatatgaagaaagcctgcaatttatgcgaacatatattgcaggattca

SEQ ID NO: 1934 - protein, 207 aa, Vibrio sp.
MFDQTKKSSHVHNICKFMSLKNDAVVRTLSILEFDFCFHLEYNADIKTFTSQPFGFHYQFNNRKCRYTPDFLATDHDEHSTFFEVKHSSQILKPDFRERFKEKQRVAFNEFNRRLVLVTEKQIRMGPTLDNFKLLHRYSGLRTVTEFQKLVLAFIQRKQMVKLQEVSLYFGLSEQDTLISTLPWISSGQVKTNLNNIGFGLETYVWC

SEQ ID NO: 1935 - protein, 621 aa, Vibrio sp.
MPSDSNNIFGFFDEFEASEGESQQLPIELIQEPIEIFSTIDTQSPKVQQEVIRRIKIIDFVERRLKGGWTEKNLNPILSLIEPELKLTPPSWRTLATWKKSYFEAGKDPCALIPKHTFKGNRQKEMDSQSLIDEAVQNVYLTRERLSVAEAYRYYKSRVIQINRGIVEGKIKPISDRSFYNRIHDLPPYEVAIARFGKRYADREFRSVGQQVAATKPMEFVEIDHTPVPVILIDDELEIPLGRPYLTMLYDRFSKCIVGCSINFREPSFDSVRKALLNSLLDKSWVKQRYPSIDNEWPCHGKIDCLVVDNGAEFWSKSLEDSLRPLVSDIQYSQAAKPWRKSGIEKLFDQMNKGLVNALPGKTFTNPTQLQDYNPKKDAVVRVSVFLELLHKWIVDYYHMAPDSRERDIPYHKWNQSEWTPSYYSGVEKEQLRVELGLLRHRTIGVAGIRLHNLHYQSSELIEYRKYWASNNGKKLFVKTKTDPSDISSIHVYLESEKRYIKVPAVDNTGYTKGLSLFEHERIQKVRRLNTKQLTDDEALADTFLYMKKRIQEETDRFRGAKSNKASLPKTGNTSKLAKFNDVGSEGPSSINVIPVTHKSEVVSDASEYLDDDDFEDIEGY

SEQ ID NO: 1936 - protein, 371 aa, Vibrio sp.
MTMILKILKGINLNLTPKQLEQLKSFETSFIEYPAITEIYSIFDQLRFNHSLGGEPESFLLTGEAGSGKTALINNYLSRFQSGSTWEKQPVLSTRVPSRINEQNTLTQFLVDLDCKSGGRGIRRRNEIALGEAVVKQLKRKSVELIIVNEIQELVEFSTAEQRQVIANTFKYISEEARVSFVLVGMPYADVIATEPQWNSRLSWRRKIDYFKLLKAKSHSNRTVSYGFDLEQKKHFARFVAGLSARMGFDEPPVLTKNEVLYPLFVMCRGECRALKHFLKDALLMSFNENVDTINKAILTRTFSFKFPYLDNPFDSPVEQLRLHQIDAGSTYNLNAITAEDKILAPRFTDAIPLSMLLSKIRLKLRVAFVI

SEQ ID NO: 1937 - protein, 403 aa, Vibrio sp.
MNTDLQLYPDESLESFLLRLSQEQGYERFSHFAEDIWFDTMDQHEAISGAFPLELNRVNIYHAQTTSQMRARVLIHLENQFKLNNFGVLRLALSHSKAQFSPQYKAVHRFGSDYPYAFLRKRFTPICPLCISEAPYIRQQWQYISHQACEHHGCKLVHHCPECISRLEYQGTESISQCECGYELRNSPVEDASEAEVLVARWLSGSDSKPLGLLKAGMTLSERYGFLIWYVSRYSDVDDISFEAFIDYCFAWPTSLKEDLDALVLKADVVRVRDWRKAFFSEAFGSLLKDCRHLPSRELSKNLVLNEVLRYLSGLVSDNPASSKGNVGDVLLSPLEASTLLSCTTDEVYRLYEFGEIKAAIRPRMHTKIASHESAFTLRSVVETKLTRMSSEMDGLCVYLPEW

SEQ ID NO: 1938 - protein, 695 aa, Vibrio sp.
MTKLIELLSIEDANKKQAMLKKWFMPYTADIEVDGLEETALTVLVNLSSHHKGDKCNDWLDKVRAKQHLSDSENIDSSIGELKWFHSHNLKYPDCRVAEQRLIAKPLQTDEVFISGRSLEPSLGWAHNSAYYRHVLWLLNPFRWQSKSTNVLTLVREGHHIWLALLQDFGLEVKTLVALQKAINAQVPDSTFPTSVSSYSKQLRFPWENDYVSITPVVNHSIQRELEVRARDKESKLSFVTSSLPNSASIGSLCGSLGGNMKIMNYPLGVKSTLNGTLATNRNKTGRYFDDYQVTNHQVCLVLSRLTGSEPLKTNKQRDKARNVQSKILRKQIALWMLPLIELRDRANLNPSEQFLNSLDSLASAFLTLPESELKSLATQFNHRLHYVLQENKFTHKFAYHPKLLQVIKCQIVWVLNQLSKPSTSDETTQSEQYIYLTSMRVQDAVAMSSPYLSGAPSLTALWGFMHRYQREFSQLIGSDSSLEFSSFSFFVRSEDIQSTAKLTEPNSVATKRTVSNAKRPTIRSERLADLEIDMVIRVKGHERLADHFSELKASLPMAFAGGYLFQPPISSEVNWLNIFGSQSEVFHAIKGAPTYGRWLYPSELQPSSFDELELQISSDADIHPVSLGYHLLEKPTFRENSITECHAYAENAIGVAKRVNPIEVRFSGRGHYFEHAFWSLEYSYATILMKNYRN

SEQ ID NO: 1939 - protein, 345 aa, Vibrio sp.
MDLCSQLNYVRSLSPGKAYFYYLSKDGEMCPVGIDRTRLRAPKAGYSEAYKGNNFFAKNVAPQDLAYANPQYIEECYVTPGVDDIYCAFSLRIRANSLFPEVCNNDDVRNALVSLSSVYKELNGYQELAHRYAKNILSGAWLWRNKECRALSIEVTTSEEERIIVNDALRLSWYGHWDEESTLSLELLMAYLSRALSDRSESFYMDIRAKLSVGWGDEVYPSQEFLDTKEDGIPTKQLATVKLSNGKETVAFHGQKVGAALQSIDDWWHEDPDKVLRVNEYGADREYVIARRHVALENDFYHLIKNTESWVKEMNKTKVIPNDVHFIMSVLVKGGLFNGASGKAK

SEQ ID NO: 1940 - protein, 200 aa, Vibrio sp.
MNKRYFFYIRYLPEQVDCGLLAGRCISQMHKFMVNNKQAMNQIGVSFPCWCADSVGNSIAFISEDKDLLIGLTFQPYFSVMKEEELFELSDVHQVPEGATELRFVRNQTIGKSFIGSKKRRMKRSIARAELTDSQSLPVADEDREVEHFHRIPISSGSSRQDFILHVQKEHVGESVPTNFNSYGFATNQDKRGTVPDIHI

SEQ ID NO: 1941 - DNA, 621 bp, Vibrio sp.
  source 1..621: mol_type = genomic DNA
atgaaaaaacggattcttagaaactcgtcagtaaaaaacatctcacgctttgtcagtctcaaaacgaactctatccatacagtcgaatccgacttggagtttgacgcatgtttccacttcgaattttcgccacagattataactttcgaagcgcagcctatcggttttgaatattttatcgaaggtaaggtgcataggtatacgcccgactttttagtcacatacaaagattcataccaatcattttatgagataaagcccaagcacattgcagaaaaagatgagtttaaagaaaagtttagagctcagaaagaacaagcattgggcgacggtaaagacctgcacgtattgacagatgatgatattcaaatatacccattgctcgataacttaaggatcattcatcgttatgcttgcgatgagcgtcttaactctattcaaagaaatatattgaatctatttaagaaatatggagagctcaggatagagcaggttgttcaatattcttcagttcattcttctcagttattaccctcactttatgatttgattgctaggcagttgttaagtattgatatgcaccagcctattggttggcaaagccctatttggagctcttag

SEQ ID NO: 1942 - DNA, 1872 bp, Vibrio sp.
  source 1..1872: mol_type = genomic DNA
atgccaagtgaaggttctaagcgatttggcgagctatttcctagtaccaacttcgataatgaatcgaaaccaaaggaaacgctatcactccccttatggaaagatgttgatctgacgtttaaggatgtcttttctgttgatgaagaccgaagaaatgaggccatacatagatataacattctagaattccttatagatcaatatggtaccgatttttcaaaaaagcaaatagatgagtcacttactgctttaatagataaatttggttcaagtacaccatcagcaatcagcatttataggtactggagagattttaaaaaatcaaattttcagcttaactccctaattcctaaagtctctgctggcaatacaaaaagaaatactcccgatgaacttgaacctttaattcaaggtgcaataagaaattacttttctgaagaatgcccgacagcaacatcggcatacgtaactcttgaggttgaaattgatcggcataacgaaatcaatggaactcaatttgaaccgttctcaatacaggcatttaggaagagactaaggaagcactctgagtacgaaaaaatattacttagaaagggaaaaagtgtagctgattctactttcagaaaagtgggggaaaggccagcaacaacacgagtattggaacgtgtagaagcggaccatactaggcttgatttatttattattgatgaaaaaaacggtataccgttagggcgaccctggctcacagttttgtacgatactcatacaaagagcattgtgggtttctatctagggttcgagccgccgagttacttatcagtatcactggcacttgtgaatgcaattcttccaaaagaacacgtcaaagaactatacccatcagtagaagggtgttggccttgttatggcttacctgagcatttgattgtcgataatggtactgagtttaacagtagtgacttcaaaatagcgtgcaaagacctgaaaataaaagttaagaaaaacccgactaaaaagccttggcttaaagggtcagtagagcgatattttcgaactatcaataatcgatttctctctagaatgccgggtaagagttttactaatatatttgagagaaaagattacgatccactcaaaaatgcagttattgataattcgcttctgcaagaaatggttcatatctggatagtggatgtttaccaaaatggaaaaaacgggctagaaaacaatatcccaaatctaagttgggtcgatgctgttaattcttcaattcccccacgtcctttcaaagggtctagagatgaattgaagtttaacctaggaaaaaaccgtgaggtatctctcgataagaatggggttaggttaggcacaacaatacgctactccagtgttcgtctagcaagatattttggacacaaaacttgtaaagacatgaaaagtgtacgtgtgaggatcaagtatgatcctagttgtcttggtagggtttatgtacttgatgaaacgaaagaagagttttttgctgtagacgcaattgatgctgattacgcctattctgtttctgagtggttacacaagacttgttgtaactatgcaaggcgacatattcgcaagaactacaaccacagagatgttgttaaagcttggcgtaaaattctcgatattattgatgaagcatttgaaaaaacaggtcaaaataagaaacaaaactctctagggactacaactacatctcgggtgcagcgtataaaagagcattctaaaagagcaacttccgaagcaaaaacacaacaagttgattatgtaaaatcagaacttgatgatgaattagattgggatatcgaggttaatactaatggttggtcgataaagtga

SEQ ID NO: 1943 - DNA, 981 bp, Vibrio sp.
  source 1..981: mol_type = genomic DNA
atggatagtaataaaacagaaagcacagctgagatggtcaaacaaatcttcattcagagcccgctaataaccgacattcttgatgatatttcagattgccgagaatttagtgacggtattcatgaaccagactgtatgatcgttgttggagatactgggtcgggaaaaacaacgctgataaataagtatttaaacgaaaaccctcgttcagagacaagcgaaggttcttttataccgattttatcgacttctctcccacccaatgcgaccccgattacggcttctgagcagttgctatctgacctaggggatccactcgctttttctagagggagtgatcctgtcaaggtcgcccaagaaatgagtgacttaatgaagtcatgcggagttgaattaattatcatagatgagtttcaacacatgatagatcggaagaataagcaaattttacatagtgcagctgactggttgaagatgctcattgtacgttcaaaggtaccagtggtgctttttggcatgccttactcagtggtaattttggaggcaaatagtcaattagcaggacgcttcgagttacagcacactcttgagcctttccggttgaatagcaaaaataaccgtagtatctataaaacgtttttaacaatgcttgatgacgcattaccttttggtgagtgttctggtcttgctgaacctgacatgatgaagcgtatctacgcattttcccaaggtaatctacgtcggatcagaaaactcattaatagagcgagtaggcttgcattacgtgatcattcaaataaagttgcattaaaacactttgccaaagcagcacccaaagtcagccaggtcgcatgtgaaaatctaaatccttttgaagttactattaaggaattgaagatcaatcatccccctcaagatattgggtgggaaaattatctgtttcaacaagaaaaagacgtatcggcaaaaggtttattttga

SEQ ID NO: 1944 - DNA, 1185 bp, Vibrio sp.
  source 1..1185: mol_type = genomic DNA
atgcttttacaaagacccaaaccacacagtaacgaaagcttggagagcttctttatccgagttgcaaataaaaatggctatgaagatgtgaaccgttttcttatggccacgaaacgttaccttcaagatatcgacttctcagggttccagaccttccctactaacatctgcaagatgaatcctgcgtcagccaaaagcagttccagtgcccgtacagcctcactcctgaaactcgctcaattaacgtttaacgaacctaccgagttacttggattagcagttaacagaacaaacttaaaatattctccatcaactagtgccgtgatccgtggctcagaagtttttcctcgcagtttactccggacaaagtccataccctgctgcccattatgcttacaagaaaatggttacgcttcttacctttggcattttgagggttacgatcactgccatatccataatgtacctttactcaacagctgtcgctgtggtgctgagtacgactatcgagtgtctggtttaagtggaatgtgcggcagttgtgaagcacctatcgccataaagagtcgagaaaaaagtcataacgccacactctctgttgcgaattggctagcgggcaatgaatcaaaagatctgccagatctccctccaagctaccgttggggcttagtacattggtggattcatatcagcaatgatccgttcgagcacctttcgttcgtccaatttttctcgaactggccaagttcgtttcactccataattgatagtgagatcgagttcaatctagagcacgccattgttggaaaaagtgaattacggataaaagatctcctagggcggatattgtttagttctgttcggttaccagaacgcaacctgcagcacaatatcgttctaggagagcttctacggcatacagagatgcatttatgggataacaacggtctgatcgctaaccttcgaatgaacgctctagagactactgtattcctcaattgcagtaaggatgagttagcctcaatggtagaacagcgcatcttaaagccaaatcgtaaaactaagccaaacatacctctggtggttaacgactacttattttatttcggcgacatcttctgcctttggttagccgaatttcaaactgatgaatttaaccgctctttctatgtgtcgaggtggtaa

SEQ ID NO: 1945 - DNA, 1923 bp, Vibrio sp.
  source 1..1923: mol_type = genomic DNA
atggagagtctgaaagagttactacaatcaagaccagatgatttgaacgtagagttaaagcgaacattccgccctcttactccacatatcaatatcgatggaaaggagcttgatgctctcactgtattagtgaacttaaccgacaaaacagccgttcaaaaagatctacttgatagggttaaatgcaagcaaaagcttagagacgaaaaatggtgggctcgctgtctaaaaacggttgaatacaggcaaagccacaacctaaaatttccagacatacgctctgaaggtgttattcgcgcgactcctctggggcagctacccgattttttactttcatcttctaaattagaaccacacaactgggcgtacagccatgattccagcgatgttaacaaaagcgctttattaaccaatgaatttcgttggaatggtgtaatttcatgccttggtgatttgcttaaagatgtagaacacccgttgtggcaaaaactcaatacgcttggctgctaccagaaaacacgtaaggctatcgctaaacaattggctcagatttctcaaacaacgattaacgtcagtctcgctccaaattacttaactcaactatctttgcctgataacgacagttcttatatttcactctcgccagtggcttctcaatcgatgcaaagtcactgttatcaagcgctaaaaaatgagtatcgctatacagcgttaacccgttacagtcgcagtactaacatgggagtattacctatgacatgtggtggtgctttgaagatgttgaaaactgtccctaacttttcccttacacatcattatcagataaacattggaaaatcttggttgacctcaagtcatattcaatcgttaaaacagtaccaaacgcatactcaatatttaatgccaaaaaacaagcgagtggcttaccgcagaacagtcaaaaacgagatacaagagatggttaaggcttggttggcaacacaagacaacaccatggatgttaatactcttgttcaacatttaaacgatgatctatcccgcttcaaatcagctaagtgtttcgcatacgagccgagcattactaaactcctgcttgggctcatcaagcgtgaactaaccgaacctacaaccgtttcaactaatatttgccgcagtgaaaaaaaggattcattctttgtgattccaaatataagagtttgtggagcaagcgcgttgagttcacctatcacggtcggtcttccatcactcactgctttcttggggtttactcacgcgtttgaacgtaacttaaatgagtcttttcctacgctcgcaattgattcgtttgccatctgtgtccatcaactacacgttgaaaaacgcggtttaacaaaagaatatatacaaaaagcaaaccacaccatatcgccacccgctacatacgatgactggcagtctgatttggtctttagtttggtgattaggtttaatcgtagcttgaacgttgatgacaatactattgttcgagctctgccgaaacggtttgccagaggttccgctaaaatagctattgcagatttcaaatacatccggtcattttcaacgttagaaaagacgattcaatcctttcctcagaaaaccggcaaatggctatcgatgcatactgaacctatcgaaaacatgagtgatattttatcggaagttaaagagaaccgaaaattaaccccaagctgtgttgggtatcattttcttgaagagccgaccgacaaacctaactctcttcgaggttataaacatgctttttctgagtgcatcattggtctgattgagccaatcacttttgatcaaaacaccgacataaatactattttgtggcatcacaagtgctatcaaaactacctttctgtgcagccaaggagtacctatcatggaactaccgactaa

SEQ ID NO: 1946 - DNA, 1062 bp, Vibrio sp.
  source 1..1062: mol_type = genomic DNA
atggaactaccgactaacctagcctatgaacgctctattgatccttctgatgtgtgctttctagttgtgtggccagatgggcgaaagacccccttaacctacacttctcgtactgtactaggacaaatggaaaccgcagccttagcttatgagccgtcggggcggaccaaagagagtgcaaccgctgaaaaactggctcaaggtaacccacatcaagtcgatttttgtcatgctcctttcggtgcgagccacattgaatgctacttttcggtctctttttcttctgagctacgcaaaccttacaagtgtaattcgtctacggttaaacacacactaatgcagctaatcaaagcgtatgaagaaaatattggttggaatgaattggtttctcgatatctagtcaatatatgtaatggatcatggctgtggaaaaatactaaaaaagcctattgctgggatatagagttaaccccttggccctgggcgggaggtgctgtcaaatttcaaaacataagggctaactaccttgaaagaagtgactttgagaaccataaagattgggaagctattgctcaaatgaccaaaaatgctttttctcactctaatggtttggccatatttgaagtaaaagccaccttgcggctaccaaccaataaacagattttcccgagccaagcattcaccgaaaatgaaagtaacaacactaataaatctaagaaacaaagcaagggacgaatttttcaaagcacaacggttgacggtgaacggagcccaatattgggtatttataaaactggtgccgccattgcgaccatagacgactggtaccccgatgcaactgaggcactacgtgtcggccggtttggggttcataaagaagatgtcacttgctaccgtcacccttctacacaaaaagatttcttttttatacttcagcacacagagtcttatattgaagcactcacgtcttcagataaaccaaatcaagagaccataaacgacctgcattttttggtcgcaaatatcatcaagggtggaatgttccagcataagggaaattaa

SEQ ID NO: 1947 - DNA, 600 bp, Vibrio sp.
  source 1..600: mol_type = genomic DNA
atgaagtggtactacaaaacggtcacttttctgccagcgcgttgtaacaatgaatcattagccgctaagtgccttcggattcttcatggctttaactatgagtatgaaacaagaaatattggcgtttcatttcctctttggagtgactataccatcggaaataaaatttcttttgtgagcacaaataaaatcgaactcgatttgctactcaaacagcactacttcacccaaatgaaagagctgcactattttgatatatcaaatacaaaggttgtccctgacggctgcgagtatgtttcatttaagcgttgccagtcaatagacaaagcaacacctgcaggacaagctagaaaagcgaaaagattaaaaaaacgtgcggaagaaagaggtgaagtgtttgacttatcctcgttcaaacaacacgaagttgttgcactccatcactaccactcacttgaggaagacagtaaaagtcgtggaggtagttttcgactcaatataagaacattcaaagaagctcgcttagacggagatgcactatttagcagctatggtcttgcgaatactggaaacaaatctcaacccgtccccctaatttga

SEQ ID NO: 1948 - DNA, 28 bp, Vibrio sp.
  source 1..28: mol_type = genomic DNA
gtgaactgccgaataggtagctgataat

SEQ ID NO: 1949 - DNA, 510 bp, Vibrio sp.
  source 1..510: mol_type = genomic DNA
tgttgaaacaaccataaagtgataacaacgaatcaattaaaatcataggcttaatcgaaaaacaaccatatcttgatatcgcataaaacaaccataagttgatattttggtgaaaaggatattccaaccttcatagtttagtaagaaactttcttacagaacttacacttatgcctgatttgtactgcatagcatgttttcaccggcattgggggcgaactcgaaagctaaaaaactatagaattcatcannnnnnnnnnaaaattcgaagtggaaacatgcgtcaaactccaagtcggattcgactgtatggatagagttcgttttgagactgacaaagcgtgagatgttttttactgacgagtttctaagaatccgttttttcataataaacaaccatacctgtagtaaactttctcaagtgttgtacactttataagcaatttcaaggtatggttgtttttatttcagcgtatggtttcgtaaaatcaacgtatggttttttttaca

SEQ ID NO: 1950 - protein, 206 aa, Vibrio sp.
MKKRILRNSSVKNISRFVSLKTNSIHTVESDLEFDACFHFEFSPQIITFEAQPIGFEYFIEGKVHRYTPDFLVTYKDSYQSFYEIKPKHIAEKDEFKEKFRAQKEQALGDGKDLHVLTDDDIQIYPLLDNLRIIHRYACDERLNSIQRNILNLFKKYGELRIEQVVQYSSVHSSQLLPSLYDLIARQLLSIDMHQPIGWQSPIWSS

SEQ ID NO: 1951 - protein, 623 aa, Vibrio sp.
MPSEGSKRFGELFPSTNFDNESKPKETLSLPLWKDVDLTFKDVFSVDEDRRNEAIHRYNILEFLIDQYGTDFSKKQIDESLTALIDKFGSSTPSAISIYRYWRDFKKSNFQLNSLIPKVSAGNTKRNTPDELEPLIQGAIRNYFSEECPTATSAYVTLEVEIDRHNEINGTQFEPFSIQAFRKRLRKHSEYEKILLRKGKSVADSTFRKVGERPATTRVLERVEADHTRLDLFIIDEKNGIPLGRPWLTVLYDTHTKSIVGFYLGFEPPSYLSVSLALVNAILPKEHVKELYPSVEGCWPCYGLPEHLIVDNGTEFNSSDFKIACKDLKIKVKKNPTKKPWLKGSVERYFRTINNRFLSRMPGKSFTNIFERKDYDPLKNAVIDNSLLQEMVHIWIVDVYQNGKNGLENNIPNLSWVDAVNSSIPPRPFKGSRDELKFNLGKNREVSLDKNGVRLGTTIRYSSVRLARYFGHKTCKDMKSVRVRIKYDPSCLGRVYVLDETKEEFFAVDAIDADYAYSVSEWLHKTCCNYARRHIRKNYNHRDVVKAWRKILDIIDEAFEKTGQNKKQNSLGTTTTSRVQRIKEHSKRATSEAKTQQVDYVKSELDDELDWDIEVNTNGWSIK

SEQ ID NO: 1952 - protein, 326 aa, Vibrio sp.
MDSNKTESTAEMVKQIFIQSPLITDILDDISDCREFSDGIHEPDCMIVVGDTGSGKTTLINKYLNENPRSETSEGSFIPILSTSLPPNATPITASEQLLSDLGDPLAFSRGSDPVKVAQEMSDLMKSCGVELIIIDEFQHMIDRKNKQILHSAADWLKMLIVRSKVPVVLFGMPYSVVILEANSQLAGRFELQHTLEPFRLNSKNNRSIYKTFLTMLDDALPFGECSGLAEPDMMKRIYAFSQGNLRRIRKLINRASRLALRDHSNKVALKHFAKAAPKVSQVACENLNPFEVTIKELKINHPPQDIGWENYLFQQEKDVSAKGLF

SEQ ID NO: 1953 - protein, 394 aa, Vibrio sp.
MLLQRPKPHSNESLESFFIRVANKNGYEDVNRFLMATKRYLQDIDFSGFQTFPTNICKMNPASAKSSSSARTASLLKLAQLTFNEPTELLGLAVNRTNLKYSPSTSAVIRGSEVFPRSLLRTKSIPCCPLCLQENGYASYLWHFEGYDHCHIHNVPLLNSCRCGAEYDYRVSGLSGMCGSCEAPIAIKSREKSHNATLSVANWLAGNESKDLPDLPPSYRWGLVHWWIHISNDPFEHLSFVQFFSNWPSSFHSIIDSEIEFNLEHAIVGKSELRIKDLLGRILFSSVRLPERNLQHNIVLGELLRHTEMHLWDNNGLIANLRMNALETTVFLNCSKDELASMVEQRILKPNRKTKPNIPLVVNDYLFYFGDIFCLWLAEFQTDEFNRSFYVSRW

SEQ ID NO: 1954 - protein, 640 aa, Vibrio sp.
MESLKELLQSRPDDLNVELKRTFRPLTPHINIDGKELDALTVLVNLTDKTAVQKDLLDRVKCKQKLRDEKWWARCLKTVEYRQSHNLKFPDIRSEGVIRATPLGQLPDFLLSSSKLEPHNWAYSHDSSDVNKSALLTNEFRWNGVISCLGDLLKDVEHPLWQKLNTLGCYQKTRKAIAKQLAQISQTTINVSLAPNYLTQLSLPDNDSSYISLSPVASQSMQSHCYQALKNEYRYTALTRYSRSTNMGVLPMTCGGALKMLKTVPNFSLTHHYQINIGKSWLTSSHIQSLKQYQTHTQYLMPKNKRVAYRRTVKNEIQEMVKAWLATQDNTMDVNTLVQHLNDDLSRFKSAKCFAYEPSITKLLLGLIKRELTEPTTVSTNICRSEKKDSFFVIPNIRVCGASALSSPITVGLPSLTAFLGFTHAFERNLNESFPTLAIDSFAICVHQLHVEKRGLTKEYIQKANHTISPPATYDDWQSDLVFSLVIRFNRSLNVDDNTIVRALPKRFARGSAKIAIADFKYIRSFSTLEKTIQSFPQKTGKWLSMHTEPIENMSDILSEVKENRKLTPSCVGYHFLEEPTDKPNSLRGYKHAFSECIIGLIEPITFDQNTDINTILWHHKCYQNYLSVQPRSTYHGTTD

SEQ ID NO: 1955 - protein, 353 aa, Vibrio sp.
MELPTNLAYERSIDPSDVCFLVVWPDGRKTPLTYTSRTVLGQMETAALAYEPSGRTKESATAEKLAQGNPHQVDFCHAPFGASHIECYFSVSFSSELRKPYKCNSSTVKHTLMQLIKAYEENIGWNELVSRYLVNICNGSWLWKNTKKAYCWDIELTPWPWAGGAVKFQNIRANYLERSDFENHKDWEAIAQMTKNAFSHSNGLAIFEVKATLRLPTNKQIFPSQAFTENESNNTNKSKKQSKGRIFQSTTVDGERSPILGIYKTGAAIATIDDWYPDATEALRVGRFGVHKEDVTCYRHPSTQKDFFFILQHTESYIEALTSSDKPNQETINDLHFLVANIIKGGMFQHKGN

SEQ ID NO: 1956 - protein, 199 aa, Vibrio sp.
MKWYYKTVTFLPARCNNESLAAKCLRILHGFNYEYETRNIGVSFPLWSDYTIGNKISFVSTNKIELDLLLKQHYFTQMKELHYFDISNTKVVPDGCEYVSFKRCQSIDKATPAGQARKAKRLKKRAEERGEVFDLSSFKQHEVVALHHYHSLEEDSKSRGGSFRLNIRTFKEARLDGDALFSSYGLANTGNKSQPVPLI

SEQ ID NO: 1957 - DNA, 624 bp, Vibrio splendidus
  source 1..624: mol_type = genomic DNA
atgtacgaccaaaccaaaaaatcatcagctgttcacaacatttgtaaattcatgagtttgaaaaatgactcagttgttcgaacaatgtccatgcttgagtatgatttttgttttcatgctgaatacaatcctcaaatagttagatatgaatctcagccacatgggtttgagtactacttcaatgggcgctattgccgctacacaccagactttcagcttttcgatagcatagatacgccttctctgattgaagtaaagcattcaagtcagatccttaaaccagattttcgagcaaggtttaaagaaaagcagcttgtcgctcaagctgagtatggaaaaaaactcatcttagtgaccgagaagcagattcgaactggttttctacttagtaaccttaaattactccacggctattcagggattcgtacaatcactgatattcaaaaacatgtgcttcagtttgttcaagctaatagaagcgtgacccttcattatctttcacaccaacttaaaatctctccagatgaaacattaacagcagctttgtgctggctatcttcaggtgaaatacaaacagattttaatcagaaaaaatttgatttagaaagttctgtttggtgctag

SEQ ID NO: 1958 - DNA, 1866 bp, Vibrio splendidus
  source 1..1866: mol_type = genomic DNA
atgagtaatgatgctctctttggttttcgtgatgaatctagtagtttcgacaatgatgtagcagatgataaaacgcttccaacagaatttttagcagaagacgaaaatcttgaattggcatttggtgatctaccacacaaagagactgcattgtatcggttggacttaattcgttatttggaaaggcacgtacaaggaggttggacgcccaaaaacctagataagctcttggaagagtatgctttattgaagaaaacttcggtcccgtcatccagaacggttgctgattggaaaaagctctattacgagtcaggtaaagatgtagcgtctcttgttcctgggcatagcaaaaaaggaaacagaatactaaagaatgattcatctgatttagtaacagaagcgattcaaaccaagtttctgaccaaagagcgagtatcagtcaacaccgcctatgagtactacaaatatcgagttattgaagagaaccgacaattaacgcaaattaaaatagcgacaatttcacaacggacattttacaatcgtgtaaatgcactacctccctatgaagttgctttggctcgttatggtaaacgatatgctgataataagtttaagactgttgggtcaatcattccggcaacgcgtccaatggaatgtgtagaaatagatcacactacagctcctgttattttgcttgatgatgatttggatcttcctcttggcagaccacacttaacaatcctttatgatagatactctacttgcattgttggtctttctgtcaattatagagatcctagttacgagacagtacgagcagctttcctcaattcagttctcaagaaggattgggttaaagaaaagtacccaagcattaaatctgaatggccttgctacggaaatattacaaatttgatagtggataacggtgcggagttttggagtgatagcctagagtcagcattaaagccattagtaacagatattcaatataatcaacgtggtaaaccgtggcgaaaagcgggtgttgaaaagtcttttgataccttctataagaaactatttagtcgtttcccaggaaaaaccttcacgaaccctactcagttaaaagactacaacccgaagcgagacgctgtcattaatgtgtctgattttctcgagctgttacataagtggcttattgacgtttatcataaaaaagctgacacgaggtacaagagagttccctaccagaaatggacagagtcgcaaggaaagataatcttttgtgaaggccctgaagcagagcaattaaagattgagcttggagttgtaaaccatcggactataagaagaggcgctattgaattgcattctcttaaataccaatctgatgagttggaagagtacggtaagcagtattctagtcgtgcaagaaaaagcgcttatgtgaaaaccaagacagacccaaacgatatcagctcgatttacgtttatcttgaggaagagaaaaaatacatcaaagtcccagcagtcgatcatacgggttatacaaaaggccgatctttatatgaacatcaacggattaacagtttaagaaggttgaaagttcgtttgggagagcaagacgaatcactagccgatgcgtcattgtatttggacagagctatggatgaagcaatagaacgtatgagtcgttctaagtccaaaaaatcggcgcttcctaaaacaactcatgcttcaaaaatagcaaagcaaagaggtgttggtagcgaagggcctagcaccattgtcattacgtcacctaaacctatcagtgaagtaccaaaagaagtaatagatattggtactgctagtgatgacctcagcgatatagaggggtattag

SEQ ID NO: 1959 - DNA, 1068 bp, Vibrio splendidus
  source 1..1068: mol_type = genomic DNA
gtgaacatacttagtgagcttcaaatagagcaatatacatcttttagagagtgtttcttagaataccctcagctgacggaaatttataacgtctttgatcgaatggtattgaacagctgtcttggaggggaacaagagtcactattgctaacgggagatacaggtgttggcaagacggcgatgatagataattatgttgcaaggttcgctgctaagggtagccgctgggctgaaatgccagtattaaaaactcgcatcccaagtaaagttcgtgagcaaaatacgttagaaagattattaattgatttagatagtcgagcctctagccgccgcaggagaccttacaaagaaggagcgttagaacaaggagtcatcaaaagtttagttgaaaaaaaagtgaagcttgtgatcgttaatgaggttcaggagctgatggaattcaaagatgctaatgaacgacaaacaatagcgaatacttttaagatgataagtgaggaagctcaagtttcatttgtcttggtgggtatgccctatgcgactatgctcgctgaagaagaccaatggaattctcgtttaggctggaagcgacacttaagttattttcacctttctaagctgagcgaagccgataacaaaggttatatacctgatgcagaagggaaacggcattttgcaagctttgttgccggacttgcaggccggatggggtttgaaaaacgccctaacttaactggggatgaaattctattgcctttattttcagtctgtcgcggagaatgccgtgtgctgaagcactttcttgcggatgcgttactcaacgcattgcaatcttcaaaggatacgattgataagccattattatcggcttgttttgatactaaatacccttatgcgaaacagaatcctttcgagtgtaagttaacagaactcaagctagtagaactgaaaacagaaacttcttacaacaaaggtgctcaatttaaagaagaccgattaataggtcggtcatttactgatttattaccagttcatatgttgctgagtaagacacctttaaaagctcagtga

SEQ ID NO: 1960 - DNA, 1212 bp, Vibrio splendidus
  source 1..1212: mol_type = genomic DNA
gtgaaaacggacattcaactttaccctgacgaatcgctcgaaagcttcttgttgcgcttatcgcaagagcaaggttacgagcgattttctcatttcgccgaagatatctggttcgacaccatggatcagcatgaggcgattgctggtgctttccccttagagctcgaacgagtcaatatctaccacgctcaaaccacaagccaaatgcgggtgcgagtgcttatccaccttgagaaccaattaaagctcaacaactttggtgtactgcgtctagcgttatcacattcaaaagctcaattctctccgcaatacaaagctgttcatagatttggtgttgactacccttatgcttttcttcgcaaacgcttcacgcctatttgccctctgtgtattggtgaagctccctacattcgccagcagtggcaatttatctctcaccaagcttgtgaacatcatggctgtaaactgatttatcactgccctgagtgtaagtcgagacttgaataccaacgtaccgagagtagtagtcaatgtgaatgtggtttcgaactccgaaactcgccagtcgaagatgctccagaggctgagaccttggttgcccgatggttgtcaggaaatgattcaaaacccttgggattgctgaaggcagaaatgacgttatctgagcgctatggtttcttactttggtatgtaaatcgctatggtgatatcgatggtctctgttttgagtcattcatcgaatactgcggctcttggccaacgtcattgtggcaagacttcgatgttttgaaagagaagacagagctcgtccgagcaaaagattggaagaagatgtttttcaatgaagcttttggtgctctgcttaaagattgccgtcagttacccagtcggcagctgagtcacaatatcgtgcttactcaggtgttagcttactttacacagctgatggcaacagtatcttcaagcgcgaaaggtaatataggtgatgtgctgctcagccccttagaagcttctacattgctttcttgtacaacagatgaggtatatcggttgtatgagtttggtgagatcaaagccgcgatcaggccgcgaatgcacacaaagattgcaagtcacgaatcggcgtttactctgagaagtatcattgaaacaaagttgacgcgaatgagctctgaaagtgatggtttaagcgtgtatctaccagagtggtaa

SEQ ID NO: 1961 - DNA, 2088 bp, Vibrio splendidus
  source 1..2088: mol_type = genomic DNA
atgacaaaattaagtgacctattggcaatcgaagacgaagtagtaaagcaggcttctctaaagaagatgttcatgccctatacggaagatgtctgtgttgaagggtttgaaaaagaagcgctaacgatcttgctcaatctcagttcaagccatcaagcggatagatgctcggattggttggatgttgcccgtgctaaaaggtattttaaagcggctgagaacctagacacatcccttgatgagatcaaatggttccacactcataatctcaagtttccagactgccgagttaaagatcagcgaataattgcgcagcctcttgtgacaaccgaggcatttatttcaagcgcagcattagagcaacgcttggggtgggcgcataactctgcagtgtatcgccatacattgtggttattgaatccttttcgttggcaatcacagtccgtgagtcttctttcacttattcagcaagaaacccctgtttggctcgagctgcttaaaggttttggtttaggcactaagtcacttgttcgcttacaaaacacaatggcagaacagctacctgaaaatagcctccctgacagagtcagtacttacagcaagcaactacggtttccatggggggatgattatgtttcggtgaccccagtggtcagtcatgccatccaaagagagttagaagtgagatcgagaagtcgagaaagcaagctcagctttgtgtcttcatcgctgccaaactcggcaagtatcgggaatctgtgtggcagtttaggtgggcatatgaaagtccttaactacccgctagacgtcaaaccagcacaaggtgggacgttaactgaaagtcgcaaaaagagtggctgctactttgatgactatcaggtaactaacgccaaaatttgtcaggtgttaaatcacttaattggatcagaaccatcaaaaacacagaagcaaagagagatcgctcgtaaggttagaagtaagatattgcgaaagcagatagccttgtggatgcttccattaattgagctaagagatattgttgatgctgaccctaatcaacagcaattggaacatgatgacactttaactcaagccttttgggcgctaccagaatcggatctaggctctttagctagtgagtttaactgtcgcttacatctcgcgtttcaaaataataagtttgccgcaaagtttgcctatcaccccaagcttatgcaggtcgtcaaagcccaaatcgtatgggtactcgaacaaatcagtaaaccaaatggcaatgaagataaggtaacgggtgagcagtatatctatttgtcatcaatgagagtgcaagatgcggtcgcaatgagtagcccatacctatgtggtgctccttctttgacggctatttggggttttatgcatcgctatcaaagagagtttaataagctagctaattgtgattccctgtttgagttttcgagtttctctttttatgttcgaagtgagaacattcaaccgacggccaagcttaccgaacccaactcagtcgccaaagcgcgaacggtttctaacgcgaagcgaccaactattcgtagtgaacgattggcagacctagaaatagacttagttattagagtccatagtgacagccgaatttcagattttaagtccgcgcttaaaacagctcttcccgtagttttttccggaggggcattataccaaccacagctatcgacgcagattgagtggctaaggacgtttaccagcaggagtgagcttttccatgtcataaaagggttaccagcatacgggcgatggttatatccaagtgaaaaccagccgagtgattttgatgagctagagcgttttattactaaagacgctgataatttgccagtttctattggctaccatttgttagaacaaccaactaaacggggcaactcaatcaccagttgtcacgcttatgcagagaatgcgatagggcttgctcagcgagtaaacccgatagaagtacgttttagtggaagagatcactttttaaaccacgccttttggtcgatagaatgcagtagcgaaactattcttataaaaaactatagggattaa

SEQ ID NO: 1962 - DNA, 1032 bp, Vibrio splendidus
  source 1..1032: mol_type = genomic DNA
atggaactttgcactcagctgaattacgttcgatcactctctgctggcaaagcatatttctaccatctttctaaaagtggtgagatgtgtccccttgaagttgatagaactaggttgcgcgcaccaaaagggggttatgcagaagcctataaagggggcaagtttgtaaaaaagaatgttgctccacaagacttagcttactccaatcctcagttcattgaagagtgttacgtaaagccgggtgtagatgatatctactgtgcattcccccttcgaattcgagccaattctctaacccctgagatctgtagtgacgatgaagtgcgcagtaaactttcgttactggctaacacttataaagagctcaatgggtatcaggagctcgctcatcgatacgcgaaaaatatcctgcttggcagttggctgtggcgtaacagagagtgtcgaaagctgttgatagaagtgaccaccagtgattcacaaaccctgattgtagaaaacgcaacaaagctttcttggtatggtcattgggatgaggcttcagcagaatgcctagaaaagctcacagcctatttgatgcgagccctgtctaacccgaccgaatatttctatatggatgtcaaagctaaaattggagttggttggggagatgaggtttacccaagccaagagtttttagagagccgagaagatggtgttcctactaagcagttagctactgtcgaactattggacggaaaagaaaccgttgcgtttcatggtcaaaaagttggagccgcgttgcaatcgattgacgattggtggcatgaaaacgcagataaacccttaagagtgaatgagtatggaactgaccgagagtacgttatagcaaggcgacatgtttcctatggaaatgacttttaccagttagtcagaaatacagagaattggattgagacaatgacagcttctcagaccatcccaaatgacgtgcactttattatgtcggtcttgattaaaggtggtctcttcaattgttccaaagcgaagtaa

SEQ ID NO: 1963 - DNA, 606 bp, Vibrio splendidus
  source 1..606: mol_type = genomic DNA
atgacgacgcgttactacttctgtatacgttatacccctgttcaagccgactatgagctgttagcaggacgttgtatctctcaaatgcacttgtttatggtcaataaccgacaagccatcaataaaataggcgtgagttttcccgactggagtgatgttacggttggtcaaaccatagcctttgttgctgaagataaagagatgatggtcggactctcttttcaaccctatttttctttgatggtaaatgaaggtttatttgagatttccagtgtatgtgaggtgccggatactgcgatagaggtgaggtttacccgtaaccaaacgattgggaaaagctttctgggttccaagaaacgtcgaatcaaacgtagcatggcgagagccgaactatctggtgttgaaccatcgttaccagccactaatgaagagcgtgtcatcgatagttttcatcgaataccaatctccagcggttcatctggagaagattatatgttgtttgtacaaaaggagtttgtcggtgagcgcggtacagcaaactttaatagctatggtttagccaccaatcaagaaagaaaaggcacggtacctgagttacgtttttaa

SEQ ID NO: 1964 - DNA, 26 bp, Vibrio splendidus
  source 1..26: mol_type = genomic DNA
gtgtcctgccgcataggcagctaaga

SEQ ID NO: 1965 - DNA, 510 bp, Vibrio splendidus
  source 1..510: mol_type = genomic DNA
tgatgcttgcaacataagtccgcataattcgaaccaagtatcaaagagttaaagtactatttgcaacataagttcgcataacattgcatcgaaagtctgcatatttacagaactactaaaattcaacgtagtaaaattaccacactccgatcaacccttcgaaagacatagtgtacatgtatgggtaagaattcagtctctgaaggttttggacaattttgagttagtgtctttgctaatttagcaagtcnnnnnnnnnnactatttgaggattgtattcagcatgaaaacaaaaatcatactcaagcatggacattgttcgaacaactgagtcatttttcaaactcatgaatttacaaatgttgtgaacagctgatgattttttggtttggtcgtacatagcaaaagcacttttgttgtaaacctacaacaaaaaatagaccatgaagacttagggtgcaaataagaaaagaagcctgcaatttatgcgaacatatattgcaggcttca

SEQ ID NO: 1966 - protein, 207 aa, Vibrio splendidus
MYDQTKKSSAVHNICKFMSLKNDSVVRTMSMLEYDFCFHAEYNPQIVRYESQPHGFEYYFNGRYCRYTPDFQLFDSIDTPSLIEVKHSSQILKPDFRARFKEKQLVAQAEYGKKLILVTEKQIRTGFLLSNLKLLHGYSGIRTITDIQKHVLQFVQANRSVTLHYLSHQLKISPDETLTAALCWLSSGEIQTDFNQKKFDLESSVWC

SEQ ID NO: 1967 - protein, 621 aa, Vibrio splendidus
MSNDALFGFRDESSSFDNDVADDKTLPTEFLAEDENLELAFGDLPHKETALYRLDLIRYLERHVQGGWTPKNLDKLLEEYALLKKTSVPSSRTVADWKKLYYESGKDVASLVPGHSKKGNRILKNDSSDLVTEAIQTKFLTKERVSVNTAYEYYKYRVIEENRQLTQIKIATISQRTFYNRVNALPPYEVALARYGKRYADNKFKTVGSIIPATRPMECVEIDHTTAPVILLDDDLDLPLGRPHLTILYDRYSTCIVGLSVNYRDPSYETVRAAFLNSVLKKDWVKEKYPSIKSEWPCYGNITNLIVDNGAEFWSDSLESALKPLVTDIQYNQRGKPWRKAGVEKSFDTFYKKLFSRFPGKTFTNPTQLKDYNPKRDAVINVSDFLELLHKWLIDVYHKKADTRYKRVPYQKWTESQGKIIFCEGPEAEQLKIELGVVNHRTIRRGAIELHSLKYQSDELEEYGKQYSSRARKSAYVKTKTDPNDISSIYVYLEEEKKYIKVPAVDHTGYTKGRSLYEHQRINSLRRLKVRLGEQDESLADASLYLDRAMDEAIERMSRSKSKKSALPKTTHASKIAKQRGVGSEGPSTIVITSPKPISEVPKEVIDIGTASDDLSDIEGY

SEQ ID NO: 1968 - protein, 355 aa, Vibrio splendidus
MNILSELQIEQYTSFRECFLEYPQLTEIYNVFDRMVLNSCLGGEQESLLLTGDTGVGKTAMIDNYVARFAAKGSRWAEMPVLKTRIPSKVREQNTLERLLIDLDSRASSRRRRPYKEGALEQGVIKSLVEKKVKLVIVNEVQELMEFKDANERQTIANTFKMISEEAQVSFVLVGMPYATMLAEEDQWNSRLGWKRHLSYFHLSKLSEADNKGYIPDAEGKRHFASFVAGLAGRMGFEKRPNLTGDEILLPLFSVCRGECRVLKHFLADALLNALQSSKDTIDKPLLSACFDTKYPYAKQNPFECKLTELKLVELKTETSYNKGAQFKEDRLIGRSFTDLLPVHMLLSKTPLKAQ

SEQ ID NO: 1969 - protein, 403 aa, Vibrio splendidus
MKTDIQLYPDESLESFLLRLSQEQGYERFSHFAEDIWFDTMDQHEAIAGAFPLELERVNIYHAQTTSQMRVRVLIHLENQLKLNNFGVLRLALSHSKAQFSPQYKAVHRFGVDYPYAFLRKRFTPICPLCIGEAPYIRQQWQFISHQACEHHGCKLIYHCPECKSRLEYQRTESSSQCECGFELRNSPVEDAPEAETLVARWLSGNDSKPLGLLKAEMTLSERYGFLLWYVNRYGDIDGLCFESFIEYCGSWPTSLWQDFDVLKEKTELVRAKDWKKMFFNEAFGALLKDCRQLPSRQLSHNIVLTQVLAYFTQLMATVSSSAKGNIGDVLLSPLEASTLLSCTTDEVYRLYEFGEIKAAIRPRMHTKIASHESAFTLRSIIETKLTRMSSESDGLSVYLPEW

SEQ ID NO: 1970 - protein, 695 aa, Vibrio splendidus
MTKLSDLLAIEDEVVKQASLKKMFMPYTEDVCVEGFEKEALTILLNLSSSHQADRCSDWLDVARAKRYFKAAENLDTSLDEIKWFHTHNLKFPDCRVKDQRIIAQPLVTTEAFISSAALEQRLGWAHNSAVYRHTLWLLNPFRWQSQSVSLLSLIQQETPVWLELLKGFGLGTKSLVRLQNTMAEQLPENSLPDRVSTYSKQLRFPWGDDYVSVTPVVSHAIQRELEVRSRSRESKLSFVSSSLPNSASIGNLCGSLGGHMKVLNYPLDVKPAQGGTLTESRKKSGCYFDDYQVTNAKICQVLNHLIGSEPSKTQKQREIARKVRSKILRKQIALWMLPLIELRDIVDADPNQQQLEHDDTLTQAFWALPESDLGSLASEFNCRLHLAFQNNKFAAKFAYHPKLMQVVKAQIVWVLEQISKPNGNEDKVTGEQYIYLSSMRVQDAVAMSSPYLCGAPSLTAIWGFMHRYQREFNKLANCDSLFEFSSFSFYVRSENIQPTAKLTEPNSVAKARTVSNAKRPTIRSERLADLEIDLVIRVHSDSRISDFKSALKTALPVVFSGGALYQPQLSTQIEWLRTFTSRSELFHVIKGLPAYGRWLYPSENQPSDFDELERFITKDADNLPVSIGYHLLEQPTKRGNSITSCHAYAENAIGLAQRVNPIEVRFSGRDHFLNHAFWSIECSSETILIKNYRD

SEQ ID NO: 1971 - protein, 343 aa, Vibrio splendidus
MELCTQLNYVRSLSAGKAYFYHLSKSGEMCPLEVDRTRLRAPKGGYAEAYKGGKFVKKNVAPQDLAYSNPQFIEECYVKPGVDDIYCAFPLRIRANSLTPEICSDDEVRSKLSLLANTYKELNGYQELAHRYAKNILLGSWLWRNRECRKLLIEVTTSDSQTLIVENATKLSWYGHWDEASAECLEKLTAYLMRALSNPTEYFYMDVKAKIGVGWGDEVYPSQEFLESREDGVPTKQLATVELLDGKETVAFHGQKVGAALQSIDDWWHENADKPLRVNEYGTDREYVIARRHVSYGNDFYQLVRNTENWIETMTASQTIPNDVHFIMSVLIKGGLFNCSKAK

SEQ ID NO: 1972 - protein, 201 aa, Vibrio splendidus
MTTRYYFCIRYTPVQADYELLAGRCISQMHLFMVNNRQAINKIGVSFPDWSDVTVGQTIAFVAEDKEMMVGLSFQPYFSLMVNEGLFEISSVCEVPDTAIEVRFTRNQTIGKSFLGSKKRRIKRSMARAELSGVEPSLPATNEERVIDSFHRIPISSGSSGEDYMLFVQKEFVGERGTANFNSYGLATNQERKGTVPELRF

SEQ ID NO: 1973 - DNA, 2490 bp, Aliivibrio wodanis
  source 1..2490: mol_type = genomic DNA
atgtacgttcgtacactaaaacaatctcaagtaaaaaacattagcaaatttatgagcctgaagaatgattcgatcattcgtacagaatctatgcttgaatttgatatgtgctttcatcttgaatattctcctgatgttgttagctttgaatctcaacctcaaggctttcattacgaatatcaaggaaaacgcctcccctatactccagattttctcattacacattcatctggacagcaacaattacttgaagttaaacctctttctaaaacccaatgtcctgattttcaatcaaaattcatccaaaaacagcaagcagcccagaaattaaatctttcattaatccttattaccgaaaagcaaattagaacaggtcatttactcaacaacttcaaacttctgcatagatatgctggcctacatagtatatcggccactcaaaaatcaatcattaacctcatccagacagtaaataaaattcaaattaatcaaattgcacacaggttaaatatcagtaatggagaggtattagctggtgttttaagttggctatcaaaagggacactgcaaacggtttacacaaatgaaatgattaatggcaactctattgtatcgttaggtttatcaatggatatagaatttccatttactgatgaatttcaaaaaatattaactactcaatcctatccagctgaaatcactaatgataaaaaaacagaagtgcttacgccttctcttgattcatacgatgacgctataaaagcagaagtattgcgtcgtatttcttttcttaggtggataaagcctcgtttaaaaggtggttggacagaaaaaaatttaacacctcttcttaacgatgctgaaattgatttaaaagtgagcgcaccaaaatggcgaacccttgctgaatggcataagaattatcacaaaagtggggaaaaggtatcctctttaattccaaagcactcacataaaggtaataaaaatatgaatactgatagcgattttttgataacaaaagcaattaacgaaaaatatttaacactaaaccgatgctctatcagtcaaacttttaagtactattgtgatttagtaataattgaaaatcgctctatacctacaaagaaaataaaactggtcagtcaacgtactttttataaccgaatcaatgcactacctaaatatgatgtcgctttaaagcgttacggaaaacgatatgctgatattaattaccgcaccgtagataaaatgataacagcaacaaggcctttagaacgagtagaaatagaccacacgcctcttgacttaatcttgctcgatgacactttagagataccattaggtcgcccatacttaacaattttaatagatagctatagtaaatgcatcgtgggctacaatcttagcttcaggcctcctagctttgaatctattcgccatgctttttgtaatgcatgccttgataaatctttaattacacagcaatatcctcaccttcaacacgattggcctgttgcaggaaaaattgaaaatcttgttgttgataatggcgctgagttctggagtaatagcttagaagatagtttactgccttttgctaccaatattttatataacaaggttggtgaaccatggatgaaacctcttgttgaaaagttttttgacctgttaaataaaggcttagtccattccctcccaggaacaactcgctcaagaatagagcaactgaaaggttataatcctaaaaaagatgcagcgattacattcagtttatttttagaactatttcatacgtggattatcgatatctatcatatgacttccgatacaagagagactgctgttccttattttaaatggcaagaaggagtaacggctttaccccctctcacctatacagatgaagaggctcaacaattacgaatagagcttggaatattaaatactcgaacggttcgtcttggaggtatttttcttcatggattacgttatgaatcagaagagttaagtgaatacagaaaaatttggggggctattgataagaataacctaacgctgaaaacaaaaaccgacccttcagatatatcacatatttttgtctatttaactaatgaatcacgctatattaaagttccttgcataacagatattagttatacatctggccttacgttatttcagcatcaaaccgctcaaaaattgcaaagaactaaaacaagattacaaatagatcatgaaaaactcgctgattcacgtatgtatgttgaaaatagaattgcggaagaagtggagaaaatcaaatctaataaaaaacgtactgcgaaaactacccatgcatcaaagatcgctcgacaccaagatattggtagtcatactcaaaagtcgattcaagtacctaatgagcaaagtgaaatcaaaaaactgaataaaaatgaacatgatgttttaaatggatgggatgaacaacatgatgatttagagggattctga

SEQ ID NO: 1974 - DNA, 1011 bp, Aliivibrio wodanis
  source 1..1011: mol_type = genomic DNA
atgcacactttatcttcgactcaaaaagagcaactcatcagctttaatcaatgctttattgagtatccaataattactcatatctactctatttttaatgatttacgaatgaatcaaggtttaggtgcagaaccacaatgtatgctcttacttggtgatactggctcaggaaaatcagcactcattaataactatctgttacgacaaccgccatcaaatttttccgcactcagttcattacccgttttacatacacgtatcccacgtagagtgaataacgaacaaaccatgtatcaactgttaactgacttaggacaatcaccttcaggatcgagaagagcaaaacgctcagaaatcgctctcgccgaaggagtcgttcgagctttaaagcgtaaaaaaacagaactcattattattaatgaattccaagaactcatcgaattttcaagtgctaaagaacgtcagaatgtcgctaacacgcttaaatacattagtgaagaagctagagtatcaattgtgttagttggtatgccctatgcagatattattgctgaagagcctcaatggggatctcgcttaacatggaaaacacaaatcgaatatttttcattaaaaaatgacatgaaaacatatgttcaattcctaaaaggcctagcaaatcgaatgggatatgatgaggtgccatcattgcatagcaaggagcttgctattccactgttttcaatttgtaggggtgagctaaggcaacttaagaacttctgctctgatgcgatgctagaaagctttaagcaaaacaaaaacacactaactcatgatgtattaagtgccactttcaagtacaaattcccaacgaagaaaaatccatttgaaatgaatgtagctgacgttccaattcaagaggtagagtcttattcaaagtataatctaaacgcaatgactgatgatgaacgtcttactgcaactaagtttcttgatgctatgtctttatcttcactgttgagtaagacttga

SEQ ID NO: 1975 - DNA, 1200 bp, Aliivibrio wodanis
  source 1..1200: mol_type = genomic DNA
atgcttaatccaatagagctttatgaagatgaatcgctagagagctgtttattaaggatcagtcagaataattgctatgattcatttcaggattttagcgatgaagtttggtttcaagtcaaagaagaggatcgtgaggttcgaggaactttccctgcaaccctaaatacggtaaatatctatcactctcacacatcaagtgacttaaagctcaaagcactaattaaaattgagcagtggcttgagataaataactcccctttattaaaaagcgccttaagcagatcaagcagtactttcttacgccaacattctgctgtttttagaaatggtgttgatataccaagaatcctgctcagaaaaaatggaattccagtatgccctgagtgcctaaaagagaacgaatacatacgtcaagaatggcacttcatcactcacgatgtatgcacaaggcataaaataggtctattacatcactgcccagagtgtaaagcctctatcaattatcaaaaaattgaaaacattacggtttgtcagtgtggattcaaattcagtgatcacttagctccgcaagcaaatagcaatgccttactcattgcacaatggcttaacggcgaaaatactaaattagctaatatttggggagaacaccaagcaatatcatctcgctttggtgtcttactttggtatatcaatagatataatctgacagatgatttttctacttcatttgtaaaatattcattgaattggccctcgaacttctattccgaactcgatgagcaaatagataaagctaaaacagttcagattaaaccatttaataagatattttttaatgagatatttgataacctgttattagattgccaacgcttacctacacgagaatttaaaacgaatcccatattaagtcatgtatatcagtactttctatctcgctaccaaattcaacctaactctgatgtcttctcaatcttgctaagcccattagaggcatcgagcttgctttcttgcactaccgatcaaatctatcgtttatatgaattaggttttcttaaattaggcgttaggccaaaactgcatcaaaaaatagcaagtcaccaatcagtttttacactctcaagtattattctagtcaagctttcaaacatgcaatccagtcaagatgaattgcatcactacctttcagcgtggtaa

SEQ ID NO: 1976 - DNA, 2070 bp, Aliivibrio wodanis
  source 1..2070: mol_type = genomic DNA
atggaatttacagatattctcatcattcaagatgtaaaggaacgcaacagagctttcaaggttgcatttgctcactactcttcagctatttttattgatgatcatgaagtcgaagcgattacatgcctacttaatttgtgtacgccaaaaacggaggattacctagacaaaactagcgcatctctgtttttaaataatcatgataatattcaaaagtgtcttgacgaacttaagtggttccatagtcacaatgttaaatatccagattgccgagttaaggggcaaagcattatttctttaccaatcgattcagtaagtaacaccataaacagtaatgtagttccttatcgattaggttggtctcatgacagtggaaaggttaactatactcattttctactctcttgctttaaatggagaggagtacaaacaactcttagtcaattattcataaccgacacgctgttttggttagatatcataaaaaaaatacaatgtaactggaccaagaaacaaactgagcaatttattcattccatacaaaaagaaatgcctgcaaaaacacttccagaagatatcagcccatactcaaaacagatcttattcccatataaaaatgactatctaactttaactcctgttacttctaactcaattcaaacatggttagaacaccaatctaggaaacctaatgatattcgttggattaaacgagaaagtaagcaccctgctagtgtaggcgctttatcatcttctatcggtggttaccatagcttactatcttcgctaccaagcacatcacaatcaccacactcgtatcacgataatatgactagcaaaactgaatgtagagaagctttttgtgcttcagctatcactgagaaaagtacgactgacgcattacaaaggctcatcagttctgaagtaagaatgaatgtgaaacatagaaaacaaatcagaaaatcagggattcatttcattagacaaaaaatagctctttggcttactcctctgattcgatggagagatcatatagataataaccagatacaaatcactaatgaccatccatcattagttaacctattcttgtcgtctcctattgctaattttcccgatttattaacaccattgcataatcacctaaatcaaactctaggaaataataaatacacaaaacgctttgcttatcaccctgatttaatgcctattttcaaatcacaaatttcatggattctgaataaactaacacaagatgaaaatataaatcagcagcccgttttaactagaacccaatttatccatcttaaaaatttaaggctatacaatggcaatgcgttaagctccccctatgtttgtggactaccttcactaactggtttttgggggtttatgcatgacttcgaacgaagattaaaaacaaagattgaagaaaacattcattttgaagctttcagcctatttgttcatcaatatgaattacaatcatctcctccgctctgtgaagcttcggatgtttataaaaaaagagaactatcacctgcaaaacgtttattaacgcaaccttcttattcttgtgatatgcgttttgacctcattatcaaagttcacactgaggttaatttaagcgatattagtcaacgtatgcaatctgcaatgcctgctcgttgtgttggtggtacgttacatcaaccttcgttacatgaaagcttagaatggcttagaacctatacatcgtctgagcatttatttgaagaattagcttgtcttcctaactctggtcgttggatatacccaccatcggaaacatttaacactccagatgaatttctttctatattgggaaatagcacacaccttgctatttgtaatggttattcatttcttgaagatccaacatatagagagaatgtgagccttaatcaacacgtattttgtgaacctttaattggattagcagagcaagtaatacctatagatatgagacttaaccgacaaaaacattatttttcaaatgctttttggtcgatcaatagtgatttcaattctattcttatttcaaaagcatga

SEQ ID NO: 1977 - DNA, 1035 bp, Aliivibrio wodanis
  source 1..1035: mol_type = genomic DNA
atgaagctgtgtaataacctgaactacactcgatcattgtcaccgggaaaggctgttttttattatgaaagtaaagatggtcaaatgaatcctattaagtgtgagcaaactcatttaagagcgcctaaagctggattttcagaagcttttaatagcgattactcaactaaaaacactgctccacaagatctctcctttagtaaccctcaatttattgaagagtgttatgttcctgttggtattgatgaaatcaaaattcgattttcattacgtatagaagcgaattcattacaaccagataaatgctctgatattcaaattagagaaatattgcaagctttcgccactaaatataaagaaaatggcggctatcaagaacttggtgaacgatacgcaaaaaacttactttctggtacttggctatggcggaatgagcataatctaggtacaagtatttcaataaaaacaacaagtaaccaagaatttaatatcaataatgcctttaagctatcaagaaaaacctccgctaaagataaaaaaacaatatcaaagttaggaagtgaaatcgcaagtgcattatctgaccctgaccattattactttgccgatataacagcaacaatcaatgtggctttctgccaagaaatttatcctagccaagagtttttagacactaaagaaaaagggaagccaagcaaagtatatgcaaaaacgtcacttcaaactggtgaaaaaaccattgcttttcatgcacaaaagattggagctgcaattcaacttatcgacgattggtgggctgacgatgccgatattccattaagagtaaatgagtttggtgctgatcatcacaatgtcatagccagaaggcacccctcacatcgtaatgacttttataccttaattcaaaacgctgataactactgcgcgcaactgaatgaaaattcagatattactgatgatatgcattacgttatggctgtattagtaaaaggaggactgtttcaaaaaagtgcttcttcaaaaaaaggaaagtag

SEQ ID NO: 1978 - DNA, 642 bp, Aliivibrio wodanis
  source 1..642: mol_type = genomic DNA
atgctcactcactattttagtattacgtatgtgcctgatgattgtgataatgagttattggcaggacgttgcatcgctgaatttcacaagtttatctctagtctaaggctgatagaaaacaactcttttgccattggcttcccaaattggtctgaacaaagtattgggaatgaatttgctattttttctgataactctgaattattaagtgccattaagtaccagccctatttcaatttaatgaagagtgaggaattattttctattacagatatcaagcctgtgccaaataatcttcctcaaataagattcatcagaaaccagtctattgggaaaatatttataggttcaaaaaaacgtagaattcagcgttcaatcacaagaaataataaagagcatacacctatatcaaatgaagacagagagtttgataccttccacaaagtgtcgtgctctagtaaaagtaaacagcaacaatttatccttcatattcaaaaagatatcaccccgagaactacagactctaacgatagctacaatagttatggcttagcgacaaatagtaaacatttaggcactgttcctgatttatcaaaaatacctttttattgcgaagacaaattatcaaataaagatcaatga

SEQ ID NO: 1979 - DNA, 28 bp, Aliivibrio wodanis
  source 1..28: mol_type = genomic DNA
gtaacctgccggataggcagccaagaat

SEQ ID NO: 1980 - DNA, 510 bp, Aliivibrio wodanis
  source 1..510: mol_type = genomic DNA
tgatgcttgcaacataagcttgcatagctctcatataaaaatcaaaagcttagttttgaatttgcaacataagatcacatggttttgcagtgatagtctgcaaaatgttttaccttaaaatatgactgtaattttagtatgtaatttaatttcatgtgttattaataaatgtaacttttttttggacagaaccttcttagagtagccacttaaattagataaatacagataacttttgtatcataaaatcnnnnnnnnnnacaacatcaggagaatattcaagatgaaagcacatatcaaattcaagcatagattctgtacgaatgatcgaatcattcttcaggctcataaatttgctaatgttttttacttgagattgttttagtgtacgaacgtacatgatattcacctctatgttgtaaacttacaactaaaggtagtttatgcaggcttattttgcaaatttgtagacttctttgcaatttatgcagagtaattttgcaagcatca

SEQ ID NO: 1981 - protein, 829 aa, Aliivibrio wodanis
MYVRTLKQSQVKNISKFMSLKNDSIIRTESMLEFDMCFHLEYSPDVVSFESQPQGFHYEYQGKRLPYTPDFLITHSSGQQQLLEVKPLSKTQCPDFQSKFIQKQQAAQKLNLSLILITEKQIRTGHLLNNFKLLHRYAGLHSISATQKSIINLIQTVNKIQINQIAHRLNISNGEVLAGVLSWLSKGTLQTVYTNEMINGNSIVSLGLSMDIEFPFTDEFQKILTTQSYPAEITNDKKTEVLTPSLDSYDDAIKAEVLRRISFLRWIKPRLKGGWTEKNLTPLLNDAEIDLKVSAPKWRTLAEWHKNYHKSGEKVSSLIPKHSHKGNKNMNTDSDFLITKAINEKYLTLNRCSISQTFKYYCDLVIIENRSIPTKKIKLVSQRTFYNRINALPKYDVALKRYGKRYADINYRTVDKMITATRPLERVEIDHTPLDLILLDDTLEIPLGRPYLTILIDSYSKCIVGYNLSFRPPSFESIRHAFCNACLDKSLITQQYPHLQHDWPVAGKIENLVVDNGAEFWSNSLEDSLLPFATNILYNKVGEPWMKPLVEKFFDLLNKGLVHSLPGTTRSRIEQLKGYNPKKDAAITFSLFLELFHTWIIDIYHMTSDTRETAVPYFKWQEGVTALPPLTYTDEEAQQLRIELGILNTRTVRLGGIFLHGLRYESEELSEYRKIWGAIDKNNLTLKTKTDPSDISHIFVYLTNESRYIKVPCITDISYTSGLTLFQHQTAQKLQRTKTRLQIDHEKLADSRMYVENRIAEEVEKIKSNKKRTAKTTHASKIARHQDIGSHTQKSIQVPNEQSEIKKLNKNEHDVLNGWDEQHDDLEGF

SEQ ID NO: 1982 - protein, 336 aa, Aliivibrio wodanis
MHTLSSTQKEQLISFNQCFIEYPIITHIYSIFNDLRMNQGLGAEPQCMLLLGDTGSGKSALINNYLLRQPPSNFSALSSLPVLHTRIPRRVNNEQTMYQLLTDLGQSPSGSRRAKRSEIALAEGVVRALKRKKTELIIINEFQELIEFSSAKERQNVANTLKYISEEARVSIVLVGMPYADIIAEEPQWGSRLTWKTQIEYFSLKNDMKTYVQFLKGLANRMGYDEVPSLHSKELAIPLFSICRGELRQLKNFCSDAMLESFKQNKNTLTHDVLSATFKYKFPTKKNPFEMNVADVPIQEVESYSKYNLNAMTDDERLTATKFLDAMSLSSLLSKT

SEQ ID NO: 1983 - protein, 399 aa, Aliivibrio wodanis
MLNPIELYEDESLESCLLRISQNNCYDSFQDFSDEVWFQVKEEDREVRGTFPATLNTVNIYHSHTSSDLKLKALIKIEQWLEINNSPLLKSALSRSSSTFLRQHSAVFRNGVDIPRILLRKNGIPVCPECLKENEYIRQEWHFITHDVCTRHKIGLLHHCPECKASINYQKIENITVCQCGFKFSDHLAPQANSNALLIAQWLNGENTKLANIWGEHQAISSRFGVLLWYINRYNLTDDFSTSFVKYSLNWPSNFYSELDEQIDKAKTVQIKPFNKIFFNEIFDNLLLDCQRLPTREFKTNPILSHVYQYFLSRYQIQPNSDVFSILLSPLEASSLLSCTTDQIYRLYELGFLKLGVRPKLHQKIASHQSVFTLSSIILVKLSNMQSSQDELHHYLSAW

SEQ ID NO: 1984 - protein, 689 aa, Aliivibrio wodanis
MEFTDILIIQDVKERNRAFKVAFAHYSSAIFIDDHEVEAITCLLNLCTPKTEDYLDKTSASLFLNNHDNIQKCLDELKWFHSHNVKYPDCRVKGQSIISLPIDSVSNTINSNVVPYRLGWSHDSGKVNYTHFLLSCFKWRGVQTTLSQLFITDTLFWLDIIKKIQCNWTKKQTEQFIHSIQKEMPAKTLPEDISPYSKQILFPYKNDYLTLTPVTSNSIQTWLEHQSRKPNDIRWIKRESKHPASVGALSSSIGGYHSLLSSLPSTSQSPHSYHDNMTSKTECREAFCASAITEKSTTDALQRLISSEVRMNVKHRKQIRKSGIHFIRQKIALWLTPLIRWRDHIDNNQIQITNDHPSLVNLFLSSPIANFPDLLTPLHNHLNQTLGNNKYTKRFAYHPDLMPIFKSQISWILNKLTQDENINQQPVLTRTQFIHLKNLRLYNGNALSSPYVCGLPSLTGFWGFMHDFERRLKTKIEENIHFEAFSLFVHQYELQSSPPLCEASDVYKKRELSPAKRLLTQPSYSCDMRFDLIIKVHTEVNLSDISQRMQSAMPARCVGGTLHQPSLHESLEWLRTYTSSEHLFEELACLPNSGRWIYPPSETFNTPDEFLSILGNSTHLAICNGYSFLEDPTYRENVSLNQHVFCEPLIGLAEQVIPIDMRLNRQKHYFSNAFWSINSDFNSILISKA

SEQ ID NO: 1985 - protein, 344 aa, Aliivibrio wodanis
MKLCNNLNYTRSLSPGKAVFYYESKDGQMNPIKCEQTHLRAPKAGFSEAFNSDYSTKNTAPQDLSFSNPQFIEECYVPVGIDEIKIRFSLRIEANSLQPDKCSDIQIREILQAFATKYKENGGYQELGERYAKNLLSGTWLWRNEHNLGTSISIKTTSNQEFNINNAFKLSRKTSAKDKKTISKLGSEIASALSDPDHYYFADITATINVAFCQEIYPSQEFLDTKEKGKPSKVYAKTSLQTGEKTIAFHAQKIGAAIQLIDDWWADDADIPLRVNEFGADHHNVIARRHPSHRNDFYTLIQNADNYCAQLNENSDITDDMHYVMAVLVKGGLFQKSASSKKGK

SEQ ID NO: 1986 - protein, 213 aa, Aliivibrio wodanis
MLTHYFSITYVPDDCDNELLAGRCIAEFHKFISSLRLIENNSFAIGFPNWSEQSIGNEFAIFSDNSELLSAIKYQPYFNLMKSEELFSITDIKPVPNNLPQIRFIRNQSIGKIFIGSKKRRIQRSITRNNKEHTPISNEDREFDTFHKVSCSSKSKQQQFILHIQKDITPRTTDSNDSYNSYGLATNSKHLGTVPDLSKIPFYCEDKLSNKDQ

SEQ ID NO: 1987 - DNA, 2454 bp, Parashewanella spongiae
  source 1..2454: mol_type = genomic DNA
atgcctatatcgcgtcgaaatattagtcactcaagagttaaaaatctttctaagctctctaacttcaaaaatcctaacagtgaaaaacgaattgctgagtctcacaatgaatttttagctgctcattttctgaattattttcctattgttaagtctttccagttccagccattagcttttgattatgaaaatcaagatgaaatacattcatacactagtgattttctagtagaactagaaacaggaaaatttgtttatatagaagtaaaagaagagaaagcattatattcagaagactttaaatcaatttttgaagctaaaagagcagctgcaagacagttaaataaagaattaattcttattacagagaaccagtacaacatccctcctcgaatagacaatataaaatctcttttgaacgttggaggtttttgggctgacgacaatatatctaacctagtggttggtatagtaaaaaaaagtgaaacgatcgatatagagggtattgcttatcatttaagtcaattttctagagaggaaatctttaaagcaatacgtatattgattctaaaacgagagatatattttgatttatctagttctgaactcacatttgattcgaaagtatcaagcgatactacgcaatacaataatgcagagtttttcattgatgaattcgttgagtttgatttcaacaaaaagccggcaaaaaatgaggtgaaattatttccaaaagatatggatattttccctgaaaagtataaacaagaagctctagctaagaagcgctatattaaatgggttgaacgtaagctcgtaggaaagtggacagaaaagaatataaatttacttttacatgaaataccaaattttggggttaatccgacaccgtgttcgagaagtataatgcgttggaaagatgcgtacacgaaaggaagtcgaaaactaatagctcttgttcccaagcatgtgtctaaaggcaggactattgctgtcagtgaacatgacgagtttatcgaacatggaatcagtaactatctaactgaactaagattatcaattaatgaatgttataagaaatatgaaacacaactgcgaactaataccgacttagaacctgtcagttataatacttttaagttgcgcatagataaattgcctaagtacgatgttaaatgtgcgagagaagggaaagcagctgctgatatagactttaacaattatgacgaacattgcccacccaaaaggctttacgaacaagtagaaatagaccatacggtattgactgttattttgcttgattctgagtatttatttccaattggtaggccaaccttaaccgttttaattgataaattaagtcattgtatttgtggtttttatgttagctatgaacctccatcttacaatagtgctaggcaggcaattcttcacagtatcaagcctaaagattatattaaaaacttatatccttcgataaaaaacgagtggaactgtcacggaaaaattgaaaatttgatagtcgataacggtgccgaattttggagtaccaatttagaggttgcttgcgagaattggatgaacattcagtttaatcctgtagggaaaccttggaagaaggcatttgttgagaggtttattggaactacttgccgtgaatttactgcacggtttaaaggaaaaacattttctaatattttagagaaaatgaaatacgatcctaaaaaagatgctgtcatgaggtttgatttgtttcttgagctatttcataagtggattatcgatgattatcatcaaagagcagacagtagattcaaatacattccaaatgagctctggcagaaaaattatcttaaaagcccagttttaaagttagatcaagctgaggaagaaaaactggaaaatgacttcctttgtactgaatggcgtgagtggcgaaagggtggaatacatatatttaatcttcgttatgatagcgaatatctttcaaaggtgagaaaacagtacgttaaggaaggaaatgataaaaaacagaagattttagttaaatactctcctgaaaatattaatactattagaatttacattgaagacttaggtaaatacatcgaagtcccttgtgtggatagcgtaggttatacaaaaggtctatccctatttaatcatcaggtaaaccttagagttcatcgaacttacattaaatcgaaaattgatgtcgtgtcattagcagaagtaagaaaatatgttaatgatcgtgttgaagaagaagaggagtttgtagaaaagggtagaaagaagaacctttcggccaataaagcaagatcgaggtataaatcaataaacagtaaaaacagtataagtaaaaaagacaataaatttgaagatattgaaaaaagtgaagatgcttcacctgaagattggaataacttcgctgaaggtttggagggtttctaa

SEQ ID NO: 1988 - DNA, 1131 bp, Parashewanella spongiae
  source 1..1131: mol_type = genomic DNA
atggctagactttctacagagcaatgcgttttacttaaaaatttcaaaaatgaatttattccccatgctatagctgaaactattcatgacgatttcgaacgtttgagagagaatcataggttaggcggcgaacaattgtgcatgttgatttatggcgacgaaggaagcggaaaaaaatctattataaaggcttatgaagataaatgtaaaaatgaagaggttattgatgaagggaaatttaaagtacccgttttattttctgaagtgaaactgccaataactgtgaactcattctttacgcaacttcttatagatttaggtgagttcgctggggcatatagaaaagctgagggtaagaataagaataaggatatgagtaaacagctagaagatatattgaaagaacgccttataaagcttgaaactgaactcattataatttacaaatttgaactgttattgcaatttgataaaaaaatgaggatagatgagcttgcaaaccaattaaaaagcatggctcaagagcttggaatccctttggtgatcatcggaatgccatgtatcaaaaggttgatgttaacttcaggatggagaagctatattcatatttgtcggttaattccatatttcaaattaagtaatgaacttgaaaaggcattttacgttaaggttatcaaggggctttcgaatagagcccaaaaactattttcttttgcaccaaaattagaggataaaagcatttcttatcctctatttgctgtttcgtcaggatgttttagaacaattagaaactatactaataaagctgtattactagcagtaaatgaaggtgctgaagaattgacaatagagcatttttctaaagttttcgaaagggataatgagtacccgttattaggaaaggttgattcaacgaatgatgattccatgaaaaagttgaatgaaagtattaaagatgaaagggacaaaagagattctattaacccttttaaaatatctgtagataaactaatggtcaatgaggtgatagattatgcaacttataaatatgacgaagagtctgcttcagaagtaaaatttgacactaggtttgccgataaaatttcaataaatgatttattgagaaaataa

SEQ ID NO: 1989 - DNA, 1194 bp, Parashewanella spongiae
  source 1..1194: mol_type = genomic DNA
atgagatttacagttcaaaccgagctgtttaaggatgaatcgcttgaaagttatttgcttagattagcagttgataatacgtacattgattacagtgagttcgctgacgtcattggccgctggctggtcgatcatgatcatgaattagaaggtgcatttccctgttctttagacttggtcaatctttatcatgctaaagacagtagtatttttagagtacgagcattaaaactcttcgaaacccttacgagctttaaaccttcaacgttattatctcaatctcttttacgcacgaactataaattcgctcaatatacggcattaaaatttggttccagcttaataccaagagtaatgcttcgagaaaacaaagcaccaattcctatttgcccacaatgcataaaagagtcagcttatataaggcaatgctggcacttaaaaccttataccttttgccacaagcataatctaaggcttctcaatgaatgccctaaatgcggcgacgaaatcaattatatacgctacgaagtaattgaaaagtgtatatgcggagctgacctgtcaaaaatggcagcagtacacggagatattaagtatcagaaatgcattaaaaatttatttaacgaaatagaaggcgacaaatcatcagaaataggtaagttgctttggttttcaaagtataaaaatattgagttagatgatactgaattactcaatgagttttatgattattttgaattctggcccgctacctatctaagcgaacttgagcaatttgaattaggtggaattaacaagcaaataagacctttcaaccagactccagtaaatgatatttggaaggaacaaatagcactgtcaaaattggcgtccccatttaaacagaacaatgaagtattgaaggtgctctcagagtattttgttgatcttgtttatcgatatcctaaatctgaaacactaaaccctgcggacacattgcttacaaagttagaagcatcaattttgttgagaacgcctctagagcaagtgaatcgactattgaacgagaactatttacatcgagctattaagccaaaaaaacacgaaataatagagccgttcaaaccgcttttgtatttaaggcaagtcattgagctaatggaagtaagaggaatcaatcaagcttattctaatttatatacaacaacttggtga

SEQ ID NO: 1990 - DNA, 2085 bp, Parashewanella spongiae
  source 1..2085: mol_type = genomic DNA
atgctgactataaatgagttgttagaaattgctgatattgaagagcgcaacaaagctatcaggagcagacttaggccttttcatgagccattaaatgttgacggttctgaaaaagaaatactcattgtgctgttaaatttgggttacagctcaaaagaacaagttgatttgctagagcagaagtcagcacaacaatttcttaaaggcgaagagctttttggaaagacgatctctgaagctgaatggatacatacgcacaatttaaagtatccggacatcagagtaagtaagcaaacaattcgagcgacccttcctgaagatgtagaaggcgtttgcagtaaagatatcctagaaagcatagagttaggttggtctcataatgcaacgtttgtcggtaaagtaacaccattaattacagagtttaaatggcaaggtaaagtgacctgtcttataaatttactgttaagtgagagtgccttctgggttaacttgctcataacgttaggtgtctcaaaaaggtgggtgaaccgaactaaaatacaacttgcagatataacggcaaattcttttcctgaagaagtagatcgttactctccacagttaagattctataatcaacgaggctatgtatcagtcacaccagttacaaaccataaactactatctgaaatacaaaagcgttgttttaataaagaatttcgatgtcgtaaggtcaaacatccaagggcaacatgcgcaggtcacttgataacatcattgggcggatacgtttcagtattggcttactatcccgacagaggctttaatcgaaatattaaccagtatattgacgacaagactgatagtaacttttttaattcgaagtacctcaacaatcataacttcttagaggctttaggtgagctggttttttcaccgaaacgagaaacgttgaagctaactcgcattgctagggtagcagcaataaagtcaataaggcagacactgtattggtggttagctaaagctacagattacaaaaagcatgcgaatatatcatcggatgtttcttctaacgcaaagttattcaaaaggtatttgaatcaaggcgaatcaaagaatgaattagcgagtgagcttagtaacttaattcatgagcagttagcacaagctaatcaaacaaagcagtttgcatatcactctaagctaatatcaccaattaaacggcaactccaattcttactaaaaaatagagctaatagtgaaacagagcagcaagaacaaagagttttttatcttcatctaaaacgacttagggttgaagatctggaaaccctgagttgtccatatttatgggggatgccttcaataatagcttttgctggttttgcccataaatttgaacttaatttaaaaaagctgggttttcataatattcgagtaatgggggtcgcttgttttgttcatttatatcaagtaacagctaaaacatcattgcctgcatattcacatttaaagaaagaaaaacaaagtgatcaattaaggcctacacgacctgctttagtttcagcgccaaagagtcaaatgctatttgatttggtgttaaggctttggaatggaggtaatgagtacaatttagaaagtttacctaatcctgtacagataagggaagcattacccactcgctatgcaggtggaactattttcccaacaatccggaagctagaggagcgatttacgacctcacataaccttacagagttatttaactctctaagctttatgccagcaaaaggttgttggctatacccatctcaattcaaagttcattcattagatgaactccataaggcattagatacagatttgaatctaagaccagtagctattggctatcagtatcttgaagaaccaaagtatagggatggtggcataagtgaactgcattgctatgcagaaaacttacttggcctgactcgatgcactaacagtgtggatgttagagttggtggagctcaaaggtttttaagagaggcgttttgggctcaaaaaacaactgattctgaagtgcttatggttaaatcacgtttcgagtttaaattatga

SEQ ID NO: 1991 - DNA, 1035 bp, Parashewanella spongiae
  source 1..1035: mol_type = genomic DNA
atgaaaatacctacacatctatcttacatgagatcattgtcgccatcgccagcgttattcttttataaaacagacgagtccgactttaatcctattgaagtctttagcgaaggaatcaatggcaggatgtcaggttccgcagttgcatataataaagatggtaaacttaaaaatgtaacggctaatgatcttggtcacgcaaatttacatgcgagtgaatattgttatgtacctccaaaaattaaggaattttactgtaagttttcattgaccattgctcccaatagtctttctccctatatatgcaatgatcaagatttagtaatgtatttggaaaagttagctcaatgttatgctgagaaaggcggttatcaagagttagcaaccagatatgcaaagaatattttaaatggattgtggctatggcggaacaaaaagtctcctaaagttgatatttctgtgtatgactttttgagtgaacaagaggttgctaatacagcgggtgttcaatcgctgtcttgggatggaaactgggggaaatatcacgatgagctacaaaaattatctaagataattgctcaggctcttcataataatgaagcatgcgaactggaagttgttgcaacaattcgcaatcgctttatgcaagaaatatatccaagtcagcttttacctgaagaaaacaaagtccacaagcaattagctacaacaagggttgaagatggctctgaaactacctgtttgggtcgttttaaagttggagcagcaatacagataattgatgattggcatggtggagataagcctctaagggtgagtagttatggttctgtaccagaaaggttagtcgcattacgaactccttcaaacaaaaaagatgtttattcactcttacctaaaattatcgattacattaactttttagaatctaataacctcggtgaaaatgagacttcaaatgaaattaattatctaatggctatgttggtaaaaggtgatgtattaggcatgggatcggagaaaaaaagcaaatga

SEQ ID NO: 1992 - DNA, 600 bp, Parashewanella spongiae
  source 1..600: mol_type = genomic DNA
atgagaagttatttttatatcacttatttgcctgaaaatgtgaacaatgaactgcttgcagctcgatgtgtcaatgtgctacatggttttgttgctaaagaagatgttgtcgatattggtattagttttccggcgtggagtgaacatacagtagggaatcaacttgcctttgtatcgacaagtaaaagtaagctgacaaggatacttcatcacaattatttctcaatgatgaaagaagatggtcttttttatatttctaacattgagccagtgccaacagggttaaaagagattcaatttttaagaaataatacaattgcaaaaacaacgcttggtgaaaaacgacgcagaaataaaagagcgtttgaaagggctgaagctagaggagacgaatacgcgcctgttcaaaataatcaagctcaattcatccacaattatcatattctcaattgtacaagtggtagtaaaaacatgtcattccctctttatattcaaaagagggaagatacctctcaccaaaactgtgactttaatcactacggcctcgcttctaataagttatatagtggaactgtaccagagtttaactttgaccaataa

SEQ ID NO: 1993 - DNA, 28 bp, Parashewanella spongiae
  source 1..28: mol_type = genomic DNA
gtgctccgccgaataggcagctaaaaag

SEQ ID NO: 1994 - DNA, 510 bp, Parashewanella spongiae
  source 1..510: mol_type = genomic DNA
tgttgctttcaggaattattgtcataagacgaacaagtgaatgcggactgtaaagaacggtttgtcagttaatgctgtcataattttcagtaatagctgtcataaagcaaatttattgcagtaataactgtcataaaactgctcagtttccaatgctaaaatagtaccagaaaactcgatttgattagccccttcgattagaagaaaaaagtgaaattatagaggataatgtataagagtggtggttactnnnnnnnnnntttgaagttagagagcttagaaagatttttaactcttgagtgactaatatttcgacgcgatataggcatagcgctcaccttcaactaactgaagatcacatactgaacgcttatcggataaactcaatttttttgagagcttttcgtaaatcttaatctgaagttaatttagaattaacgttatgacagtttttcctgaaaactcgacagcttttcctgaaaataatgacaacttatgttgaaagcgaca

SEQ ID NO: 1995 - protein, 817 aa, Parashewanella spongiae
MPISRRNISHSRVKNLSKLSNFKNPNSEKRIAESHNEFLAAHFLNYFPIVKSFQFQPLAFDYENQDEIHSYTSDFLVELETGKFVYIEVKEEKALYSEDFKSIFEAKRAAARQLNKELILITENQYNIPPRIDNIKSLLNVGGFWADDNISNLVVGIVKKSETIDIEGIAYHLSQFSREEIFKAIRILILKREIYFDLSSSELTFDSKVSSDTTQYNNAEFFIDEFVEFDFNKKPAKNEVKLFPKDMDIFPEKYKQEALAKKRYIKWVERKLVGKWTEKNINLLLHEIPNFGVNPTPCSRSIMRWKDAYTKGSRKLIALVPKHVSKGRTIAVSEHDEFIEHGISNYLTELRLSINECYKKYETQLRTNTDLEPVSYNTFKLRIDKLPKYDVKCAREGKAAADIDFNNYDEHCPPKRLYEQVEIDHTVLTVILLDSEYLFPIGRPTLTVLIDKLSHCICGFYVSYEPPSYNSARQAILHSIKPKDYIKNLYPSIKNEWNCHGKIENLIVDNGAEFWSTNLEVACENWMNIQFNPVGKPWKKAFVERFIGTTCREFTARFKGKTFSNILEKMKYDPKKDAVMRFDLFLELFHKWIIDDYHQRADSRFKYIPNELWQKNYLKSPVLKLDQAEEEKLENDFLCTEWREWRKGGIHIFNLRYDSEYLSKVRKQYVKEGNDKKQKILVKYSPENINTIRIYIEDLGKYIEVPCVDSVGYTKGLSLFNHQVNLRVHRTYIKSKIDVVSLAEVRKYVNDRVEEEEEFVEKGRKKNLSANKARSRYKSINSKNSISKKDNKFEDIEKSEDASPEDWNNFAEGLEGF

SEQ ID NO: 1996 - protein, 376 aa, Parashewanella spongiae
MARLSTEQCVLLKNFKNEFIPHAIAETIHDDFERLRENHRLGGEQLCMLIYGDEGSGKKSIIKAYEDKCKNEEVIDEGKFKVPVLFSEVKLPITVNSFFTQLLIDLGEFAGAYRKAEGKNKNKDMSKQLEDILKERLIKLETELIIIYKFELLLQFDKKMRIDELANQLKSMAQELGIPLVIIGMPCIKRLMLTSGWRSYIHICRLIPYFKLSNELEKAFYVKVIKGLSNRAQKLFSFAPKLEDKSISYPLFAVSSGCFRTIRNYTNKAVLLAVNEGAEELTIEHFSKVFERDNEYPLLGKVDSTNDDSMKKLNESIKDERDKRDSINPFKISVDKLMVNEVIDYATYKYDEESASEVKFDTRFADKISINDLLRK

SEQ ID NO: 1997 - protein, 397 aa, Parashewanella spongiae
MRFTVQTELFKDESLESYLLRLAVDNTYIDYSEFADVIGRWLVDHDHELEGAFPCSLDLVNLYHAKDSSIFRVRALKLFETLTSFKPSTLLSQSLLRTNYKFAQYTALKFGSSLIPRVMLRENKAPIPICPQCIKESAYIRQCWHLKPYTFCHKHNLRLLNECPKCGDEINYIRYEVIEKCICGADLSKMAAVHGDIKYQKCIKNLFNEIEGDKSSEIGKLLWFSKYKNIELDDTELLNEFYDYFEFWPATYLSELEQFELGGINKQIRPFNQTPVNDIWKEQIALSKLASPFKQNNEVLKVLSEYFVDLVYRYPKSETLNPADTLLTKLEASILLRTPLEQVNRLLNENYLHRAIKPKKHEIIEPFKPLLYLRQVIELMEVRGINQAYSNLYTTTW

SEQ ID NO: 1998 - protein, 694 aa, Parashewanella spongiae
MLTINELLEIADIEERNKAIRSRLRPFHEPLNVDGSEKEILIVLLNLGYSSKEQVDLLEQKSAQQFLKGEELFGKTISEAEWIHTHNLKYPDIRVSKQTIRATLPEDVEGVCSKDILESIELGWSHNATFVGKVTPLITEFKWQGKVTCLINLLLSESAFWVNLLITLGVSKRWVNRTKIQLADITANSFPEEVDRYSPQLRFYNQRGYVSVTPVTNHKLLSEIQKRCFNKEFRCRKVKHPRATCAGHLITSLGGYVSVLAYYPDRGFNRNINQYIDDKTDSNFFNSKYLNNHNFLEALGELVFSPKRETLKLTRIARVAAIKSIRQTLYWWLAKATDYKKHANISSDVSSNAKLFKRYLNQGESKNELASELSNLIHEQLAQANQTKQFAYHSKLISPIKRQLQFLLKNRANSETEQQEQRVFYLHLKRLRVEDLETLSCPYLWGMPSIIAFAGFAHKFELNLKKLGFHNIRVMGVACFVHLYQVTAKTSLPAYSHLKKEKQSDQLRPTRPALVSAPKSQMLFDLVLRLWNGGNEYNLESLPNPVQIREALPTRYAGGTIFPTIRKLEERFTTSHNLTELFNSLSFMPAKGCWLYPSQFKVHSLDELHKALDTDLNLRPVAIGYQYLEEPKYRDGGISELHCYAENLLGLTRCTNSVDVRVGGAQRFLREAFWAQKTTDSEVLMVKSRFEFKL

SEQ ID NO: 1999 - protein, 344 aa, Parashewanella spongiae
MKIPTHLSYMRSLSPSPALFFYKTDESDFNPIEVFSEGINGRMSGSAVAYNKDGKLKNVTANDLGHANLHASEYCYVPPKIKEFYCKFSLTIAPNSLSPYICNDQDLVMYLEKLAQCYAEKGGYQELATRYAKNILNGLWLWRNKKSPKVDISVYDFLSEQEVANTAGVQSLSWDGNWGKYHDELQKLSKIIAQALHNNEACELEVVATIRNRFMQEIYPSQLLPEENKVHKQLATTRVEDGSETTCLGRFKVGAAIQIIDDWHGGDKPLRVSSYGSVPERLVALRTPSNKKDVYSLLPKIIDYINFLESNNLGENETSNEINYLMAMLVKGDVLGMGSEKKSK

SEQ ID NO: 2000 - protein, 199 aa, Parashewanella spongiae
MRSYFYITYLPENVNNELLAARCVNVLHGFVAKEDVVDIGISFPAWSEHTVGNQLAFVSTSKSKLTRILHHNYFSMMKEDGLFYISNIEPVPTGLKEIQFLRNNTIAKTTLGEKRRRNKRAFERAEARGDEYAPVQNNQAQFIHNYHILNCTSGSKNMSFPLYIQKREDTSHQNCDFNHYGLASNKLYSGTVPEFNFDQ

SEQ ID NO: 2001 - DNA, 11759 bp, Synthetic construct
  source 1..11759: mol_type = other DNA
aacgtggctggcctggttcaccacgcgggaaacggtctgataagagacaccggcatactctgcgacatcgtataacgttactggtttcacattcaccaccctgaattgactctcttccgggcgctatcatgccataccgcgaaaggttttgcgccattcgatggtgtccgggatctcgacgctctcccttatgcgactcctgcattaggaatggataaccgtattaccgcctttgagtgagctgataccgctcgccgcagccgaacgaccgagcgcagcgagtcagtgagcgaggacacaagctgtaatacgactcactataggggaattgtgagcggataacaattcctattagttaagtataagaaggagatatacgtatgtttttgcaaagacctaaaccttacagcgatgaaagtttagaaagtttctttatccgagtggctaacaaaaatggctacggtgatgtccatcgcttcctagaagccactaaacgattccttcaagacattgaccataatggctatcaaacctttccgactgatataactcggataaacccatactcagctaaaaacagttccagcgcacgaactgcgtcattcctgaaacttgcacaattgacatttaatgaaccgccagagctacttgggttggcaattaacagaacaaacatgaaatactcgccgtcaactagcgcggttgttagaggtgcagaagtctttcctcgcagtttactacggacgcactccatcccctgctgtcctttgtgtctgcgagaaaatggctacgcctcctacctttggcactttcaggggtacgaatactgccacagccataacgtacctttaattaccacttgtagctgtggtaaggagtttgactaccgagtatctgggttaaagggcatttgctgcaaatgcaaggagcctatcaccttaaccagcagggagaacggtcatgaggcagcgtgtactgtttcaaactggcttgctggccatgaatctaaacctctgccaaatcttcctaaaagctaccgatggggtttagttcattggtggatgggtattaaagatagcgagttcgatcacttttcgttcgttcaatttttctcaaactggccaaggtcattccactcgataatcgaagatgaagtagagttcaaccttgagcatgctgttgtcagcacgtctgaattacgactaaaagatcttcttggtcgattgtttttcggttcaattcggttacctgagcggaatcttcaacacaatatcatccttggtgagcttctctgctatttagaaaatcgtttatggcaagacaagggattaatcgccaacctcaaaatgaacgcgttagaggcgactgtaatgttaaattgtagcctcgatcagattgcatcaatggttgaacaacgcatcttgaagccaaatcgaaaaagcaagcccaacagccctcttgatgttaccgattatctatttcatttcggcgatattttctgtctttggttagctgagttccaaagcgatgagtttaaccgttcgttttatgtgtcgaggtggtaaatgcaaactctgaaagaactaatcgcatccaatcctgacgacttaacaactgaacttaagagagcatttcgtccactcacaccgcatattgcaattgatggtaatgaacttgacgcactgacgatattagtcaatttaaccgataagactgatgatcagaaagacctgctcgatcgagccaaatgcaagcaaaaacttcgagatgaaaaatggtgggctagctgcataaattgcgttaattacagacaaagccataacccaaaattcccggatatacgttctgaaggcgtgattcgaacccaagccctgggtgaattaccgagtttcctactctcgtcctcaaaaatcccaccataccattggtcatatagccatgattcaaaatacgtcaacaaaagcgcattcctcaccaatgagttttgttgggatggtgagatctcatgtttgggtgagcttcttaaagatgcagatcacccactttggaatactttgaaaaagttaggttgttctcaaaaaacttgcaaagcaatggcaaaacaactagctgatattactctcacgactatcaatgtcacactcgcaccaaattacctgactcaaatatctctccccgatagtgatacatcctacatttcactctctcctgttgcatcgctatcgatgcaaagccactttcatcagaggctccaagatgaaaatcggcatagcgcgataacgcggtttagccgaactaccaacatgggggtcactgcgatgacatgtggcggcgcatttagaatgttaaagtctggcgctaagttttccagcccccctcatcaccgattaaacagtaaacgaagttggttgacgtcagagcatgttcagtcattaaaacagtaccagcgcctcaacaaaagcctcatacctgaaaactctcggattgcactccgtagaaaatacaaaatcgagcttcaaaatatggtcagatcttggtttgcaatgcaagaccatacccttgattcgaacatacttatccaacatttgaatcatgacctatcttacttaggagccacaaaacgttttgcatacgatccagcgatgaccaagctctttactgagcttttgaaacgagagttatcaaattcaatcaataatggtgagcaacacactaatggatcgtttttagtcctaccgaatatcagggtttgtggcgcaacagctttaagctccccggtaacggtggggattccatcacttacagctttctttggcttcgttcacgcatttgaacggaatataaatcgcaccacctcatcgtttcgtgttgaatcctttgcgatatgcgtccatcaactacatgtcgagaagcgaggtttgacagcagagtttgtggaaaaaggcgacgggactatatccgctcccgcgacccgggatgactggcagtgtgatgtcgtatttagccttattttgaacaccaactttgctcaacatattgaccaagatacgttagttacatcactaccaaagcgattggctcggggttcagcaaaaattgcgattgatgactttaaacatatcaactcattctcgacattagaaacagcgatcgaatctctgccaatagaagctggtaggtggttatcactttacgcacagtcaaacaataatctaagtgatctattagcagccatgacagaggaccatcagctcatggcaagctgcgtcggttaccacttgttagaagagcccaaagataaaccaaactccctcagaggttacaaacacgctatcgccgagtgcatcattggactcattaactcaatcacctttagctcagagactgatcccaacacaatcttttggtcgctaaagaactatcaaaactacctagtggtacagccaaggagtatcaacgatgaaactaccgacaaatctagcctatgagcgctctatcgacccatcagatgtctgtttttttgtcgtctggcccgatgatagaaaaacacctttaacctacaattctcgtactctgctcgggcaaatggaagcggcatcattagcctatgatgtctcaggtcaaccaataaaaagtgccaccgctgaggcgttagctcaagggaaccctcatcaagttgatttctgccacgttccatacggtgcgagtcatattgaatgcagtttctccgtctcgttttcttctgaactacgtcaaccatataagtgtaactcaagcaaagttaaacaaacgctagtgcaattagtcgagctctacgaaacgaaaatcggctggactgagctagcaacccgatatttgatgaacatttgcaacggtaaatggctgtggaaaaatacccgtaaagcctattgctggaacattgtacttacaccttggccttggaacggggaaaaggttggatttgaagatattcgtactaactacacctcacggcaagactttaaaaataataaaaattggtctgctatagttgaaatgatcaaaaccgcattttctagtactgatgggctggcgatatttgaagtcagggccaccttgcacttgccaacgaatgctatggtgcggccaagccaagttttcacagaaaaagaaagtggcagtaaaagtaaatctaaaactcaaaacagtcgagtttttcagagtacaactattgatggtgaacgatcgccaatactaggggcctttaaaacgggagcagctattgcaaccattgacgactggtatcctgaagccactgagccactaagggtcggacggtttggggttcatcgcgaagatgtcacttgctaccgtcatccgtctaccggaaaagattttttctcgatattacaacaagcagagcactatattgaagtgttgagcgccaacaaaactcccgctcaagaaactatcaacgacatgcactttttaatggctaacctgattaagggtgggatgttccagcataaaggagactgactgtgaaatggtattataagacaatcacctttctgccagagttgtgcaacaacgagtcactggctgcaaagtgtctccgcgttctgcatggatttaactatcagtatgagacacgaaatatcggcgtttcatttccgctttggtgtgatgcaacggttggaaaaaagatttcatttgtcagcaagaacaagatagaactcgacttactacttaaacaacactatttcgtccaaatggaacaacttcaatactttcatatatccaacactgttctcgtcccagaagattgtacatacgtttcctttagacgctgtcaatctatagataagctcacagcagcagggctggcaaggaaaatcagacgcctggagaaacgtgctctatctagaggcgagcaatttgacccatcatcttttgctcaaaaagagcatactgcaatagcgcactaccactcacttggggagtccagcaaacagacgaaccgcaactttcgactcaatatcaggatgctctcggagcaaccccgtgaggggaactcgatttttagtagctatggcttatcaaattcagaaaactcgtttcagcctgtacccttaatctgacctttaataaggagatatactatggcgacaagtttacctacgccctcagcaattacgacttcggcgttagagtatgcattccatactcccgctcgcaatctaacgaaatctcgcggaaaaaacattcatcgttatgtcagtgtaaagatgagtaagaggattacggtagaatctactctagagtgtgatgcctgctatcactttgattttgagccaagtattgttcgcttttgcgctcaaccgattcgatttttatattatctcaatggtcagtctcactcctatgttcctgactttctagttcaatttgataccaacgagtttgttctatatgaagtaaagtcagcttatgctaagaacaaacctgattttgatgttgaatgggaggcgaaagtaaaagcagcaactgaactagggctagaattggagcttgttgaagagagtgatattagggatacggttgtattaaataatcttaagcgcatgcatcgttatgcttcgaaagatgagctgaataacgtacataactctctcttaaaaataataaagtacaatggcgcccaatctgcaagatgcttgggagaacagttgggtttaaaaggccgaactgttttaccaattttgtgcgatttgctgtcaaggtgtttactcgatacacgtttggataagcctctatctcttgaatctcgatttgagttggccagttatggctaagaaagggttctcaagtttccatagaaaagcagtctcttcccaagatacgcttgaatcgatagagcttgtctctagcgctaattgtctagaaagtgttacgtatcaagatatatcagcatttcccgaaacaattgcggtagagattaatttccgattaagcattcttcgctttttagcgcgaaagtgcgaaaccattgtggccaaatcaattgaaccacatcgtgtagagctacagcaaaactatagtagaaaaatacccagtgcaataacgatatatcgatggtggcttgcttttcgaaaatcagactacaaccccattagcttagcacctaatatcaaggatagaggtaatagagagacaaaagtgtcaacagttgttgattctattatggaacaggcagttgaaagagttatatctggacgaaaagtcaatgttagctctgcatataaacgtgttcgacgaaaagttcgtcaatacaatctaactcatggaacgaaatacacgtatcctaagtacgaatctgtaagaaagcgagtaaaaaagaaaaccccatttgagttattagccgcagggaaaggggagagagtagctaagagagagtttcgccgaatgggaaaaaagatcctcacgtctagcgtgctagagagggttgaaatagatcacactgtcgttgacctttttgcagtacacgaagagtatcgaatcccattgggccgaccttggcttactcaattggttgattgttacagtaaagctgtaatcggtttttatttaggtttcgagcctcctagctatgtgtcggtttcccttgcacttaagaatgcaatacaacgcaaagatgacttaatctcctcgtatgaatcgatcgagaatgaatggctatgttatggcatcccagacctactcgtaactgataatggtaaagagtttttgtcgaaagcatttgatcaagcatgtgaatcactattgatcaatgtgcatcaaaataaagttgagacgcccgacaacaaacctcatgttgaacgtaactacgggactattaatacttctctgttagacgatttacctgggaaatccttcagccagtaccttcaaagagaagggtacgactctgtgggagaagctacccttacactcaatgagattagagaaatttacttaatttggttggtggatatttatcataaaaaacccaatcagagaggcactaattgccctaatgttgcgtggaaaaagggttgtcaagaatgggaaccagaggagttctctggttctaaagacgaattagactttaaatttgctattgttgattacaaacaacttactaaagtagggataactgtctacaaagaactgagttatagcaatgaccgtttagctgaatatagagggaagaaaggaaaccataaagttcagttcaagtataaccctgagtgtatggcagttatttgggtgttggatgaggatatgaatgagtactttacagttaatgcgattgactacgaatatgcaagtagagtatcactttggcaacataaatataacatgaaatatcaagcagaactaaattcagcagaatatgatgaggacaaggaaattgatgcagaaataaaaattgaagaaatcgcagatcgttcaattgttaagactaacaaaatcagagctcggaggcgtggcgctaggcatcaagagaatagcgcaagggctaagtcaatcagtaatgcgaacccggcctcgatacaaaaacatgaagatgaaatcgttagtgcagataatgacgattgggatattgattatgtctgagaaatcgtcaaatgagtgaaacgcgtgaggctcgtatatcaagagctaaaagggcatttgtatccacaccgagcgttaggaaaatcttgagttacatggatagatgtagagatctatcagacctagagtctgagcctacatgcatgatggtctatggtgcttcgggtgtaggtaaaacgaccgtcatcaagaaatacttaaatcaaaacagaagagagtccgaagccgggggcgatataataccggttttgcatattgagttgccagacaatgcgaagccagtagatgcagcaagggaattgctggttgaaatgggtgacccgctagcactttatgaaactgacttagctagattgacgaaaagactgactgaattaatccctgcggtcggcgtgaagctgattattatcgatgagttccaacatttggtggaagaaaggtcaaatcgggttcttacccaagtaggtaattggctaaaaatgatacttaacaaaacgaaatgtccaattgttatatttggtatgccatactcaaaagttgtactgcaagcaaactcgcaacttcacgggcgattttccattcaggttgaactgcgcccctttagctaccagggaggtagaggtgtatttaaaacttttttggaataccttgataaagccctaccttttgaaaaacaggctggcttagccaacgaaagtttgcagaaaaaattgtatgcattctctcagggaaacatgcgttcgttgagaaaccttatttatcaagcatctatcgaagcaattgataatcagcatgagacgataaccgaagaagatttcgtttttgcatcgaagttgacatcgggcgataaacccaactcatggaaaaatccttttgaggagggtgttgaggtaacagaagatatgttacgaccgccaccaaaagatattggttgggaggactatttgagacattcaaccccgagagtgagtaaaccaggtagaaataaaaactttttcgaataacctaggctgctgcgctgctgccaccgctgagcaataactagcataaccccttggggcctctaaacgggtcttgaggggttttttgctgaaacctcaggcattgaacctgcacggtaccgagctcgaattcactggccgtcgttttacaacgtcgtgactgggaaaaccctggcgttacccaacttaatcgccttgctatcgtggccggatcttgcggcccctcggcttgaacgaattgttagacattatttgccgactaccttggtgatctcgcctttcacgtagtggacaaattcttccaactgatctgcgcgcgaggccaagcgatcttcttcttgtccaagataagcctgtctagcttcaagtatgacgggctgatactgggccggcaggcgctccattgcccagtcggcagcgacatccttcggcgcgattttgccggttactgcgctgtaccaaatgcgggacaacgtaagcactacatttcgctcatcgccagcccagtcgggcggcgagttccatagcgttaaggtttcatttagcgcctcaaatagatcctgttcaggaaccggatcaaagagttcctccgccgctggacctaccaaggcaacgctatgttctcttgcttttgtcagcaagatagccagatcaatgtcgatcgtggctggctcgaagatacctgcaagaatgtcattgcgctgccattctccaaattgcagttcgcgcttagctggataacgccacggaatgatgtcgtcgtgcacaacaatggtgacttctacagcgcggagaatctcgctctctccaggggaagccgaagtttccaaaaggtcgttgatcaaagctcgccgcgttgtttcatcaagccttacggtcaccgtaaccagcaaatcaatatcactgtgtggcttcaggccgccatccactgcggagccgtacaaatgtacggccagcaacgtcggttcgagatggcgctcgatgacgccaactacctctgatagttgagtcgatacttcggcgatcaccgcttccctcatactcttcctttttcaatattattgaagcatttatcagggttattgtctcatgagcggatacatatttgaatgtatttagaaaaataaacaaatagctagctcactcggtcgctacgctccgggcgtgagactgcggcgggcgctgcggacacatacaaagttacccacagattccgtggataagcaggggactaacatgtgaggcaaaacagcagggccgcgccggtggcgtttttccataggctccgccctcctgccagagttcacataaacagacgcttttccggtgcatctgtgggagccgtgaggctcaaccatgaatctgacagtacgggcgaaacccgacaggacttaaagatccccaccgtttccggcgggtcgctccctcttgcgctctcctgttccgaccctgccgtttaccggatacctgttccgcctttctcccttacgggaagtgtggcgctttctcatagctcacacactggtatctcggctcggtgtaggtcgttcgctccaagctgggctgtaagcaagaactccccgttcagcccgactgctgcgccttatccggtaactgttcacttgagtccaacccggaaaagcacggtaaaacgccactggcagcagccattggtaactgggagttcgcagaggatttgtttagctaaacacgcggttgctcttgaagtgtgcgccaaagtccggctacactggaaggacagatttggttgctgtgctctgcgaaagccagttaccacggttaagcagttccccaactgacttaaccttcgatcaaaccacctccccaggtggttttttcgtttacagggcaaaagattacgcgcagaaaaaaaggatctcaagaagatcctttgatcttttctactgaaccgctctagatttcagtgcaatttatctcttcaaatgtagcacctgaagtcagccccatacgatataagttgtaattctcatgttagtcatgccccgcgcccaccggaaggagctgactgggttgaaggctctcaagggcatcggtcgagatcccggtgcctaatgagtgagctaacttacattaattgcgttgcgctcactgcccgctttccagtcgggaaacctgtcgtgccagctgcattaatgaatcggccaacgcgcggggagaggcggtttgcgtattgggcgccagggtggtttttcttttcaccagtgagacgggcaacagctgattgcccttcaccgcctggccctgagagagttgcagcaagcggtccacgctggtttgccccagcaggcgaaaatcctgtttgatggtggttaacggcgggatataacatgagctgtcttcggtatcgtcgtatcccactaccgagatgtccgcaccaacgcgcagcccggactcggtaatggcgcgcattgcgcccagcgccatctgatcgttggcaaccagcatcgcagtgggaacgatgccctcattcagcatttgcatggtttgttgaaaaccggacatggcactccagtcgccttcccgttccgctatcggctgaatttgattgcgagtgagatatttatgccagccagccagacgcagacgcgccgagacagaacttaatgggcccgctaacagcgcgatttgctggtgacccaatgcgaccagatgctccacgcccagtcgcgtaccgtcttcatgggagaaaataatactgttgatgggtgtctggtcagagacatcaagaaataacgccggaacattagtgcaggcagcttccacagcaatggcatcctggtcatccagcggatagttaatgatcagcccactgacgcgttgcgcgagaagattgtgcaccgccgctttacaggcttcgacgccgcttcgttctaccatcgacaccaccacgctggcacccagttgatcggcgcgagatttaatcgccgcgacaatttgcgacggcgcgtgcagggccagactggaggtggcaacgccaatcagcaacgactgtttgcccgccagttgttgtgccacgcggttgggaatgtaattcagctccgccatcgccgcttccactttttcccgcgttttcgcaga

SEQ ID NO: 2002 - DNA, 3665 bp, Synthetic construct; identical to SEQ ID NO: 1764
  source 1..3665: mol_type = other DNA

SEQ ID NO: 2003 - DNA, 3670 bp, Synthetic construct
  source 1..3670: mol_type = other DNA
gacgaaagggcctcgtgatacgcctatttttataggttaatgtcatgataataatggtttcttagacgtcaggtggcacttttcggggaaatgtgcgcggaacccctatttgtttatttttctaaatacattcaaatatgtatccgctcatgagacaataaccctgataaatgcttcaataatattgaaaaaggaagagtatgagtattcaacatttccgtgtcgcccttattcccttttttgcggcattttgccttcctgtttttgctcacccagaaacgctggtgaaagtaaaagatgctgaagatcagttgggtgcacgagtgggttacatcgaactggatctcaacagcggtaagatccttgagagttttcgccccgaagaacgttttccaatgatgagcacttttaaagttctgctatgtggcgcggtattatcccgtattgacgccgggcaagagcaactcggtcgccgcatacactattctcagaatgacttggttgagtactcaccagtcacagaaaagcatcttacggatggcatgacagtaagagaattatgcagtgctgccataaccatgagtgataacactgcggccaacttacttctgacaacgatcggaggaccgaaggagctaaccgcttttttgcacaacatgggggatcatgtaactcgccttgatcgttgggaaccggagctgaatgaagccataccaaacgacgagcgtgacaccacgatgcctgtagcaatggcaacaacgttgcgcaaactattaactggcgaactacttactctagcttcccggcaacaattaatagactggatggaggcggataaagttgcaggaccacttctgcgctcggcccttccggctggctggtttattgctgataaatctggagccggtgagcgtggctctcgcggtatcattgcagcactggggccagatggtaagccctcccgtatcgtagttatctacacgacggggagtcaggcaactatggatgaacgaaatagacagatcgctgagataggtgcctcactgattaagcattggtaactgtcagaccaagtttactcatatatactttagattgatttaaaacttcatttttaatttaaaaggatctaggtgaagatcctttttgataatctcatgaccaaaatcccttaacgtgagttttcgttccactgagcgtcagaccccgtagaaaagatcaaaggatcttcttgagatcctttttttctgcgcgtaatctgctgcttgcaaacaaaaaaaccaccgctaccagcggtggtttgtttgccggatcaagagctaccaactctttttccgaaggtaactggcttcagcagagcgcagataccaaatactgttcttctagtgtagccgtagttaggccaccacttcaagaactctgtagcaccgcctacatacctcgctctgctaatcctgttaccagtggctgctgccagtggcgataagtcgtgtcttaccgggttggactcaagacgatagttaccggataaggcgcagcggtcgggctgaacggggggttcgtgcacacagcccagcttggagcgaacgacctacaccgaactgagatacctacagcgtgagctatgagaaagcgccacgcttcccgaagggagaaaggcggacaggtatccggtaagcggcagggtcggaacaggagagcgcacgagggagcttccagggggaaacgcctggtatctttatagtcctgtcgggtttcgccacctctgacttgagcgtcgatttttgtgatgctcgtcaggggggcggagcctatggaaaaacgccagcaacgcggcctttttacggttcctggccttttgctggccttttgctcacatgttctttcctgcgttatcccctgattctgtggataaccgtattaccgcctttgagtgagctgataccgctcgccgcagccgaactaccgagcgcagcgagtcagtgagcgaggaagcggaagagcgcccaatacgcaaaccgcctctccccgcgcgttggccgattcattaatgcagcccaagctttgttggaacaaccataaaatgataattacacccataaattgataattatcacacccataaattgatattgcctcttcatggtctaaacttcagtaagtttacgacattttcctcgaggtatgctagctcgaacatggagaaaaaaatcactggatataccaccgttgatatatcccaatggcatcgtaaagaacattttgaggcatttcagtcagttgctcaatgtacctataaccagaccgttcagctggatattacggcctttttaaagaccgtaaagaaaaataagcacaagttttatccggcctttattcacattcttgcccgcctgatgaatgctcatccggagttccgtatggcaatgaaagacggtgagctggtgatatgggatagtgttcacccttgttacaccgttttccatgagcaaactgaaacgttttcatcgctctggagtgaataccacgacgatttccggcagtttctacacatatattcgcaagatgtggcgtgttacggtgaaaacctggcctatttccctaaagggtttattgagaatatgtttttcgtctcagccaatccctgggtgagtttcaccagttttgatttaaacgtggccaatatggacaacttcttcgcccccgttttcactatgggcaaatattatacgcaaggcgacaaggtgctgatgccgctggcgattcaggttcatcatgccgtttgtgatggcttccatgtcggcagaatgcttaatgaattacaacagtactgcgatgagtggcagggcggggcgtaatttttttaaggcagttattggtgcccttgtaatacgactcactatagggtgactcggaattgtgagcggataacaattcctgactccatgggtgaactgccgagtaggtagctgataacagtacagcgcggctgaaatcatcattaaagcggtgaactgccgagtaggtagctgataacggatccagtcagactgtcactagcataaccccttggggcctctaaacgggtcttgaggggttttttgctagagtccttactgcagtagttttgctgaaatactcgattcacaaaaatatcaacttatggttgttttgtgagatatcaatatatggttgttttgtggttaagttgctgattataaataattattaaatatcactttatggttgcatcaacaggtaccgagctcgaattcactggccgtcgttttacaacgtcgtgactgggaaaaccctggcgttacccaacttaatcgccttgcagcacatccccctttcgccagctggcgtaatagcgaagaggcccgcaccgatcgcccttcccaacagttgcgcagcctgaatggcgaatggcgcctgatgcggtattttctccttacgcatctgtgcggtatttcacaccgcatatggtgcactctcagtacaatctgctctgatgccgcatagttaagccagccccgacacccgccaacacccgctgacgcgccctgacgggcttgtctgctcccggcatccgcttacagacaagctgtgaccgtctccgggagctgcatgtgtcagaggttttcaccgtcatcaccgaaacgcgcga

SEQ ID NO: 2004 - DNA, 3670 bp, Synthetic construct
  source 1..3670: mol_type = other DNA
gacgaaagggcctcgtgatacgcctatttttataggttaatgtcatgataataatggtttcttagacgtcaggtggcacttttcggggaaatgtgcgcggaacccctatttgtttatttttctaaatacattcaaatatgtatccgctcatgagacaataaccctgataaatgcttcaataatattgaaaaaggaagagtatgagtattcaacatttccgtgtcgcccttattcccttttttgcggcattttgccttcctgtttttgctcacccagaaacgctggtgaaagtaaaagatgctgaagatcagttgggtgcacgagtgggttacatcgaactggatctcaacagcggtaagatccttgagagttttcgccccgaagaacgttttccaatgatgagcacttttaaagttctgctatgtggcgcggtattatcccgtattgacgccgggcaagagcaactcggtcgccgcatacactattctcagaatgacttggttgagtactcaccagtcacagaaaagcatcttacggatggcatgacagtaagagaattatgcagtgctgccataaccatgagtgataacactgcggccaacttacttctgacaacgatcggaggaccgaaggagctaaccgcttttttgcacaacatgggggatcatgtaactcgccttgatcgttgggaaccggagctgaatgaagccataccaaacgacgagcgtgacaccacgatgcctgtagcaatggcaacaacgttgcgcaaactattaactggcgaactacttactctagcttcccggcaacaattaatagactggatggaggcggataaagttgcaggaccacttctgcgctcggcccttccggctggctggtttattgctgataaatctggagccggtgagcgtggctctcgcggtatcattgcagcactggggccagatggtaagccctcccgtatcgtagttatctacacgacggggagtcaggcaactatggatgaacgaaatagacagatcgctgagataggtgcctcactgattaagcattggtaactgtcagaccaagtttactcatatatactttagattgatttaaaacttcatttttaatttaaaaggatctaggtgaagatcctttttgataatctcatgaccaaaatcccttaacgtgagttttcgttccactgagcgtcagaccccgtagaaaagatcaaaggatcttcttgagatcctttttttctgcgcgtaatctgctgcttgcaaacaaaaaaaccaccgctaccagcggtggtttgtttgccggatcaagagctaccaactctttttccgaaggtaactggcttcagcagagcgcagataccaaatactgttcttctagtgtagccgtagttaggccaccacttcaagaactctgtagcaccgcctacatacctcgctctgctaatcctgttaccagtggctgctgccagtggcgataagtcgtgtcttaccgggttggactcaagacgatagttaccggataaggcgcagcggtcgggctgaacggggggttcgtgcacacagcccagcttggagcgaacgacctacaccgaactgagatacctacagcgtgagctatgagaaagcgccacgcttcccgaagggagaaaggcggacaggtatccggtaagcggcagggtcggaacaggagagcgcacgagggagcttccagggggaaacgcctggtatctttatagtcctgtcgggtttcgccacctctgacttgagcgtcgatttttgtgatgctcgtcaggggggcggagcctatggaaaaacgccagcaacgcggcctttttacggttcctggccttttgctggccttttgctcacatgttctttcctgcgttatcccctgattctgtggataaccgtattaccgcctttgagtgagctgataccgctcgccgcagccgaactaccgagcgcagcgagtcagtgagcgaggaagcggaagagcgcccaatacgcaaaccgcctctccccgcgcgttggccgattcattaatgcagcccaagctttgttggaacaaccataaaatgataattacacccataaattgataattatcacacccataaattgatattgcctcttcatggtctaaacttcagtaagtttacgacattttcctcgaggtatgctagctcgaacatggagaaaaaaatcactggatataccaccgttgatatatcccaatggcatcgtaaagaacattttgaggcatttcagtcagttgctcaatgtacctataaccagaccgttcagctggatattacggcctttttaaagaccgtaaagaaaaataagcacaagttttatccggcctttattcacattcttgcccgcctgatgaatgctcatgtaatacgactcactatagggtgactcggaattgtgagcggataacaattcctgactccatgggtgaactgccgagtaggtagctgataacagtacagcgcggctgaaatcatcattaaagcggtgaactgccgagtaggtagctgataacggatccagtcagactgtcactagcataaccccttggggcctctaaacgggtcttgaggggttttttgccggagttccgtatggcaatgaaagacggtgagctggtgatatgggatagtgttcacccttgttacaccgttttccatgagcaaactgaaacgttttcatcgctctggagtgaataccacgacgatttccggcagtttctacacatatattcgcaagatgtggcgtgttacggtgaaaacctggcctatttccctaaagggtttattgagaatatgtttttcgtctcagccaatccctgggtgagtttcaccagttttgatttaaacgtggccaatatggacaacttcttcgcccccgttttcactatgggcaaatattatacgcaaggcgacaaggtgctgatgccgctggcgattcaggttcatcatgccgtttgtgatggcttccatgtcggcagaatgcttaatgaattacaacagtactgcgatgagtggcagggcggggcgtaatttttttaaggcagttattggtgcccttctagagtccttactgcagtagttttgctgaaatactcgattcacaaaaatatcaacttatggttgttttgtgagatatcaatatatggttgttttgtggttaagttgctgattataaataattattaaatatcactttatggttgcatcaacaggtaccgagctcgaattcactggccgtcgttttacaacgtcgtgactgggaaaaccctggcgttacccaacttaatcgccttgcagcacatccccctttcgccagctggcgtaatagcgaagaggcccgcaccgatcgcccttcccaacagttgcgcagcctgaatggcgaatggcgcctgatgcggtattttctccttacgcatctgtgcggtatttcacaccgcatatggtgcactctcagtacaatctgctctgatgccgcatagttaagccagccccgacacccgccaacacccgctgacgcgccctgacgggcttgtctgctcccggcatccgcttacagacaagctgtgaccgtctccgggagctgcatgtgtcagaggttttcaccgtcatcaccgaaacgcgcga

SEQ ID NO: 2005 - DNA, 3634 bp, Synthetic construct
  source 1..3634: mol_type = other DNA
gacgaaagggcctcgtgatacgcctatttttataggttaatgtcatgataataatggtttcttagacgtcaggtggcacttttcggggaaatgtgcgcggaacccctatttgtttatttttctaaatacattcaaatatgtatccgctcatgagacaataaccctgataaatgcttcaataatattgaaaaaggaagagtatgagtattcaacatttccgtgtcgcccttattcccttttttgcggcattttgccttcctgtttttgctcacccagaaacgctggtgaaagtaaaagatgctgaagatcagttgggtgcacgagtgggttacatcgaactggatctcaacagcggtaagatccttgagagttttcgccccgaagaacgttttccaatgatgagcacttttaaagttctgctatgtggcgcggtattatcccgtattgacgccgggcaagagcaactcggtcgccgcatacactattctcagaatgacttggttgagtactcaccagtcacagaaaagcatcttacggatggcatgacagtaagagaattatgcagtgctgccataaccatgagtgataacactgcggccaacttacttctgacaacgatcggaggaccgaaggagctaaccgcttttttgcacaacatgggggatcatgtaactcgccttgatcgttgggaaccggagctgaatgaagccataccaaacgacgagcgtgacaccacgatgcctgtagcaatggcaacaacgttgcgcaaactattaactggcgaactacttactctagcttcccggcaacaattaatagactggatggaggcggataaagttgcaggaccacttctgcgctcggcccttccggctggctggtttattgctgataaatctggagccggtgagcgtggctctcgcggtatcattgcagcactggggccagatggtaagccctcccgtatcgtagttatctacacgacggggagtcaggcaactatggatgaacgaaatagacagatcgctgagataggtgcctcactgattaagcattggtaactgtcagaccaagtttactcatatatactttagattgatttaaaacttcatttttaatttaaaaggatctaggtgaagatcctttttgataatctcatgaccaaaatcccttaacgtgagttttcgttccactgagcgtcagaccccgtagaaaagatcaaaggatcttcttgagatcctttttttctgcgcgtaatctgctgcttgcaaacaaaaaaaccaccgctaccagcggtggtttgtttgccggatcaagagctaccaactctttttccgaaggtaactggcttcagcagagcgcagataccaaatactgttcttctagtgtagccgtagttaggccaccacttcaagaactctgtagcaccgcctacatacctcgctctgctaatcctgttaccagtggctgctgccagtggcgataagtcgtgtcttaccgggttggactcaagacgatagttaccggataaggcgcagcggtcgggctgaacggggggttcgtgcacacagcccagcttggagcgaacgacctacaccgaactgagatacctacagcgtgagctatgagaaagcgccacgcttcccgaagggagaaaggcggacaggtatccggtaagcggcagggtcggaacaggagagcgcacgagggagcttccagggggaaacgcctggtatctttatagtcctgtcgggtttcgccacctctgacttgagcgtcgatttttgtgatgctcgtcaggggggcggagcctatggaaaaacgccagcaacgcggcctttttacggttcctggccttttgctggccttttgctcacatgttctttcctgcgttatcccctgattctgtggataaccgtattaccgcctttgagtgagctgataccgctcgccgcagccgaactaccgagcgcagcgagtcagtgagcgaggaagcggaagagcgcccaatacgcaaaccgcctctccccgcgcgttggccgattcattaatgcagcccaagctttgttggaacaaccataaaatgataattacacccataaattgataattatcacacccataaattgatattgcctcttcatggtctaaacttcagtaagtttacgacattttcctcgaggtaatacgactcactatagggtgactccatgggtgaactgccgagtaggtagctgataacagtacagcgcggctgaaatcatcattaaagcggtgaactgccgagtaggtagctgataacggatccagtcagactgtcactagcataaccccttggggcctctaaacgggtcttgaggggttttttgctagctcgaacatggagaaaaaaatcactggatataccaccgttgatatatcccaatggcatcgtaaagaacattttgaggcatttcagtcagttgctcaatgtacctataaccagaccgttcagctggatattacggcctttttaaagaccgtaaagaaaaataagcacaagttttatccggcctttattcacattcttgcccgcctgatgaatgctcatccggagttccgtatggcaatgaaagacggtgagctggtgatatgggatagtgttcacccttgttacaccgttttccatgagcaaactgaaacgttttcatcgctctggagtgaataccacgacgatttccggcagtttctacacatatattcgcaagatgtggcgtgttacggtgaaaacctggcctatttccctaaagggtttattgagaatatgtttttcgtctcagccaatccctgggtgagtttcaccagttttgatttaaacgtggccaatatggacaacttcttcgcccccgttttcactatgggcaaatattatacgcaaggcgacaaggtgctgatgccgctggcgattcaggttcatcatgccgtttgtgatggcttccatgtcggcagaatgcttaatgaattacaacagtactgcgatgagtggcagggcggggcgtaatttttttaaggcagttattggtgcccttctagagtccttactgcagtagttttgctgaaatactcgattcacaaaaatatcaacttatggttgttttgtgagatatcaatatatggttgttttgtggttaagttgctgattataaataattattaaatatcactttatggttgcatcaacaggtaccgagctcgaattcactggccgtcgttttacaacgtcgtgactgggaaaaccctggcgttacccaacttaatcgccttgcagcacatccccctttcgccagctggcgtaatagcgaagaggcccgcaccgatcgcccttcccaacagttgcgcagcctgaatggcgaatggcgcctgatgcggtattttctccttacgcatctgtgcggtatttcacaccgcatatggtgcactctcagtacaatctgctctgatgccgcatagttaagccagccccgacacccgccaacacccgctgacgcgccctgacgggcttgtctgctcccggcatccgcttacagacaagctgtgaccgtctccgggagctgcatgtgtcagaggttttcaccgtcatcaccgaaacgcgcga
